United States Patent Application Publication US 2006/0194211 A1 - sequence listing, part 2

SEQ ID NO: 4233 - DNA, 396 bp, Homo sapiens
  misc_feature (50)..(65): n includes a, c, g, or t, or contains no nucleotide
  misc_feature (88)..(133): n includes a, c, g, or t, or contains no nucleotide
  misc_feature (263)..(263): n includes a, c, g, or t, or contains no nucleotide
tgccacaagaggaccggcttctccaccagccccgagtccccgtacacgcnnnnnnnnnnnnnnnngttctacatggaggactacctgnnnnnnnnnnnnnnnnnnnnnnnnnnnnnnnnnnnnnnnnnnnnnnggcccaacgccaagaacaaccgggacctggacttcaccatcgacctggacttcaagggccagctgtgcgagctgtcctgctccaccgactaccggatgcgctgaggcccggctctcccgccctgcacgancccaggggctgagcgttcctaggcggtttcggggctcccccttcctctccctccctcccgcagaagggggttttaggggcctgggctggggggatggggagggcacatcgtgactgtgtttttcataacttat

SEQ ID NO: 4234 - DNA, 530 bp, Homo sapiens
  misc_feature (87)..(87): n includes a, c, g, or t, or contains no nucleotide
  misc_feature (90)..(90): n includes a, c, g, or t, or contains no nucleotide
  misc_feature (98)..(98): n includes a, c, g, or t, or contains no nucleotide
  misc_feature (178)..(229): n includes a, c, g, or t, or contains no nucleotide
  misc_feature (287)..(314): n includes a, c, g, or t, or contains no nucleotide
  misc_feature (366)..(366): n includes a, c, g, or t, or contains no nucleotide
  misc_feature (376)..(376): n includes a, c, g, or t, or contains no nucleotide
ctgccaggggcttcccactttggcttatttttctgacttctagctgtctgtgaatatccagaaataaaacaactctgatgtggaatncantcctcatntccagcctccccaccccagtgggaactgtgcaaagggctgccttgctgttcttgaagctgggctgtctctctccatgttnnnnnnnnnnnnnnnnnnnnnnnnnnnnnnnnnnnnnnnnnnnnnnnnnnnnttcagccttcgtgtggctcctggtaacgtggctccaccttgatgggtcaacctttgtnnnnnnnnnnnnnnnnnnnnnnnnnnnnttactatagtggtgagatggaaggaatcaaattttgccagagaaactaactnggtggccccnacaggtcttccggggccatgggcatttgtttagagccaaattcatcctcttaccagatccttttccagaaatacctgtctaggaaggtgtgatgtcagaaacaatgacatccagaaagctgaggaacaggttcctgtggagacactgagtcaga

SEQ ID NO: 4235 - DNA, 571 bp, Homo sapiens
gctactcatttgcttctatgggtatgctagaagcgagaatccgtatactaaccaacaattctcagaccccaatcctaagccctcaggaggttgtgtcttgtagccagtatgctcaaggctgtgaaggcggcttcccataccttattgcaggaaagtacgcccaagattttgggctggtggaagaagcttgcttcccctacacaggcactgattctccatgcaaaatgaaggaagactgctttcgttattactcctctgagtaccactatgtaggaggtttctatggaggctgcaatgaagccctgatgaagcttgagttggtccatcatgggcccatggcagttgcttttgaagtatatgatgacttcctccactacaaaaaggggatctaccaccacactggtctaagagaccctttcaacccctttgagctgactaatcatgctgttctgcttgtgggctatggcactgactcagcctctgggatggattactggattgttaaaaacagctggggcaccggctggggtgagaatggctacttccggatccgcagaggaactgatgagtg

SEQ ID NO: 4236 - DNA, 470 bp, Homo sapiens
  misc_feature (31)..(31): n includes a, c, g, or t, or contains no nucleotide
  misc_feature (212)..(212): n includes a, c, g, or t, or contains no nucleotide
  misc_feature (227)..(227): n includes a, c, g, or t, or contains no nucleotide
  misc_feature (234)..(234): n includes a, c, g, or t, or contains no nucleotide
  misc_feature (236)..(255): n includes a, c, g, or t, or contains no nucleotide
  misc_feature (261)..(262): n includes a, c, g, or t, or contains no nucleotide
  misc_feature (316)..(344): n includes a, c, g, or t, or contains no nucleotide
  misc_feature (356)..(402): n includes a, c, g, or t, or contains no nucleotide
acgacgaggtgcaccccaagcaacacgcctncaagcaggccttcgccaagcccaagggcccagggggcaagcggggccataagcgcctcatccgcggcccgggtgaaaatggggatgacagctaggaggctggagcagggccggccacgtgtggactgtggggctgcccaccttccgctccctgccaccatcctccttcctgggctccaggnaaagtgtttctgggnaggtcangnnnnnnnnnnnnnnnnnnnnacttgnnagcgtccgagggccaccgggctggcattttgtgacccttccctgttgctgtccnnnnnnnnnnnnnnnnnnnnnnnnnnnnncggggaccctgnnnnnnnnnnnnnnnnnnnnnnnnnnnnnnnnnnnnnnnnnnnnnnncctcccggggagctgagactagggtcccagcacagcccagaaacctttggccacaagaagtggggtca

SEQ ID NO: 4237 - DNA, 281 bp, Homo sapiens
  misc_feature (165)..(165): n includes a, c, g, or t, or contains no nucleotide
  misc_feature (185)..(185): n includes a, c, g, or t, or contains no nucleotide
  misc_feature (189)..(189): n includes a, c, g, or t, or contains no nucleotide
  misc_feature (198)..(198): n includes a, c, g, or t, or contains no nucleotide
  misc_feature (204)..(204): n includes a, c, g, or t, or contains no nucleotide
  misc_feature (210)..(211): n includes a, c, g, or t, or contains no nucleotide
  misc_feature (219)..(219): n includes a, c, g, or t, or contains no nucleotide
  misc_feature (232)..(232): n includes a, c, g, or t, or contains no nucleotide
  misc_feature (241)..(241): n includes a, c, g, or t, or contains no nucleotide
tgggagctttcctcagcaccttcaccttccctcccagtgtagcctcctgtcagtgggggctggacccttctaattcagaggtctcatgcctgcccttgcccagatgcccagggtcgtgcactctctgggataccagttcagtctccacatttctggttttctgtnccccatagtacagttcttcnagtnggacatganccccancccagnnccccctgnagccctgctgcanccatctcanccagacacaaggggaagaagcagacatcaggtgctgcact

SEQ ID NO: 4238 - DNA, 48 bp, Homo sapiens
tttctccttaacctgtggcctgcctgtgatgatctgtgacagcaaaag

SEQ ID NO: 4239 - DNA, 415 bp, Homo sapiens
ctcgaggccattgtcagcgtgattgctgagcgcaacaagaagaagcagctgccatattactacttgtccccagaccggattccgaacagtgtggccatctgagcacactgccagtctcactgtgggaaggccagctgccccagccagatggactccagcctgcctggcaggctgtctggccaggcctcttggcagtcacatctcttcctccgaggccagtacctttccatttattctttgatcttcagggaactgcatagattgtatcaaagtgtaaacaccatagggacccattctacacagagcaggactgcacaggcgtcctgtccacacccagctcagcatttccacaccaagcagcaacagcaaatcacgaccactgatagatgtctattcttgttggagacatgggatg

SEQ ID NO: 4240 - DNA, 412 bp, Homo sapiens
  misc_feature (33)..(50): n includes a, c, g, or t, or contains no nucleotide
  misc_feature (98)..(114): n includes a, c, g, or t, or contains no nucleotide
  misc_feature (201)..(265): n includes a, c, g, or t, or contains no nucleotide
  misc_feature (325)..(325): n includes a, c, g, or t, or contains no nucleotide
  misc_feature (327)..(341): n includes a, c, g, or t, or contains no nucleotide
ctcgggactgagtgcaagaatcagcatgattcnnnnnnnnnnnnnnnnnnttctcctctgtcattcggtcagccgtctcagtccatttgcggaggaannnnnnnnnnnnnnnnntggcatttaataaggaacttgatcctatacagaaactctttgtggacaagattagagaatacaaatctaagcgacagacatctggannnnnnnnnnnnnnnnnnnnnnnnnnnnnnnnnnnnnnnnnnnnnnnnnnnnnnnnnnnnnnnnnagcaaatgtttggtaatgcagacatgaatacatttcccaccttcaaatttgaagatcccnannnnnnnnnnnnnnnaaaaaccccaggcctgaagaaataaagtaaaattaatctggtaatttgtcacggattagttgtacaactag

SEQ ID NO: 4241 - DNA, 560 bp, Homo sapiens
  misc_feature (109)..(145): n includes a, c, g, or t, or contains no nucleotide
  misc_feature (195)..(212): n includes a, c, g, or t, or contains no nucleotide
  misc_feature (237)..(256): n includes a, c, g, or t, or contains no nucleotide
  misc_feature (291)..(291): n includes a, c, g, or t, or contains no nucleotide
  misc_feature (295)..(326): n includes a, c, g, or t, or contains no nucleotide
gcactgtgtgggtcaactgctatgatgtgtttggagcccagtcaccctttggtggctacaagatgtcggggagtggccgggagttgggcgagtacgggctgcaggcatnnnnnnnnnnnnnnnnnnnnnnnnnnnnnnnnnnnnncagaagaactcataagaatcatgcaagcttcctccctcagccattgatgnnnnnnnnnnnnnnnnnncagcaacaaaaccaagaaaaatgannnnnnnnnnnnnnnnnnnntatctgaaaagagaaatttttcctacaaaatctcnttgnnnnnnnnnnnnnnnnnnnnnnnnnnnnnnnnacatggtgggttggctgagggtaagagtatatgaggaaccttttaaacgacaacaatactgctagctttcaggatgatttttaaaaaatagattcaaatgtgttatcctctctctgaaacgcttcctataactcgagtttataggggaagaaaaagctattgtttacaattatatcaccattaaggcaactgctacaccctgctttgtattctgggctaagattcattaaaaac

SEQ ID NO: 4242 - DNA, 515 bp, Homo sapiens
  misc_feature (86)..(86): n includes a, c, g, or t, or contains no nucleotide
  misc_feature (92)..(92): n includes a, c, g, or t, or contains no nucleotide
cttgaatgtgtcactactcacagtctctttaatcttcagttttatctttaatctcctcttttatcttggactgacatttagcgtanctaagntgaaaaggtcatagctgagattcctggttcgggtgttacgcacacgtacttaaatgaaagcatgtggcatgttcatcgtataacacaatatgaatacagggcatgcattttgcagcagtgagtctcttcagaaaacccttttctacagttagggttgagttacttcctatcaagccagtacgtgctaacaggctcaatattcctgaatgaaatatcagactagtgacaagctcctggtcttgagatgtcttctcgttaaggagatgggccttttggaggtaaaggataaaatgaatgagttctgtcatgattcactattctagaacttgcatgacctttactgtgttagctctttgaatgttcttgaaattttagactttctttgtaaacaaatgatatgtccttatcattgtataaaagctg

SEQ ID NO: 4243 - DNA, 408 bp, Homo sapiens
  misc_feature (345)..(345): n includes a, c, g, or t, or contains no nucleotide
acctgctgagcacagtgagcattaggtactctggccacagcctctgagggtgggaggtttggggaccttgagagaagagcctgtgggctctcctattggaatctagttgggggttggaggggtaaggaacacagggtgataggggaggggtcttagttcctttttctgtatcagaagccctgtcttcacaacacaggcacacaatttcagtcccagccaaagcagaaggggtaatgacatggacttggcggggggacaagacaaagctcccgatgctgcatggggcgctgccagatctcacggtgaaccattttggcagaatacagcatggttcccacatgcatntatgcacagaagaaaatctggaaagtgatttatcaggatgtgagcactcgttgtgtctggatg

SEQ ID NO: 4244 - DNA, 591 bp, Homo sapiens
  misc_feature (54)..(54): n includes a, c, g, or t, or contains no nucleotide
ggttttgtacatttcagtccttacaaataacaaagcaatgataaacccggcacngtcctgagaggaaattcctttgcttcttaaagctgccagtcccggctttttgggggctcatgtgttataaattctggaagctcttttagctgcagtttgagcatcaggcaaatcttcttcctcttcctcggttcgcttgtgttttaaaaacaagtcagactttaagaagcggctgtagctgtcgtacttcatgagattaaagatctggtcctggagtttctggaacatcagagggtgcggttcttccaggatcttctcgttgagccgagactgcccctccacgttgacctgtgatgaggccttgctggacagaaaggtcatgtagatctcctttgccttttcctgcatctgcgtcttatcttgcattttcttaaaatcttcacatgctagccaaaacaaaacattttcttcactgaattccttttttaaaaattccctaaatcttttcacgccttctgggtcttccagcagattctccagggatgccgcccatttggctgtgctcttgaggctctggtggctgctgctggaactgcc

SEQ ID NO: 4245 - DNA, 360 bp, Homo sapiens
  misc_feature (228)..(253): n includes a, c, g, or t, or contains no nucleotide
  misc_feature (273)..(291): n includes a, c, g, or t, or contains no nucleotide
gtgatacacagatgtctttcctccccacaaacttttttaaacaaaaaacaagacctcttttctttagatggtgccacctatgcccaccacaacagagattttacatggaaaccgggctcagtgagaactgatttcctgcccaatatttgtctttgggctgtctctagtgactaattattaaggaatctagctggttatacagttcaaggctttctatgttgttaatgnnnnnnnnnnnnnnnnnnnnnnnnnnaaatacagcagcaggttacnnnnnnnnnnnnnnnnnnncgcatttatgtaaaacattcagaaaatgaagttttgaatttgttggaacattcaaaggacttgagagca

SEQ ID NO: 4246 - DNA, 523 bp, Homo sapiens
  misc_feature (279)..(279): n includes a, c, g, or t, or contains no nucleotide
  misc_feature (291)..(291): n includes a, c, g, or t, or contains no nucleotide
  misc_feature (295)..(296): n includes a, c, g, or t, or contains no nucleotide
  misc_feature (298)..(303): n includes a, c, g, or t, or contains no nucleotide
  misc_feature (305)..(307): n includes a, c, g, or t, or contains no nucleotide
  misc_feature (420)..(420): n includes a, c, g, or t, or contains no nucleotide
  misc_feature (424)..(424): n includes a, c, g, or t, or contains no nucleotide
atggttagacagcacagcgaagactgctaaatgcactgaccccccccattagaatgtgatttttgttcctttttatttctctgtgggcttttgtttttgtttttgttttggtagatcttcaatttggatatttggaggagtgaacatcgttgttttgctggagggaagatcttgatggtgtttctttccccaaaaattgacttagatattaaaatttggtgcttataagagagagttaaaaaaaaataggattgcttcaattaaaattacaaaagaganaaaaaaaaaaanaaannannnnnnannngcccagtcccctctttctgacttgtgatctcatagagcaacagtatctcctggtctgtttttagttctgtcactcgatgtcatttatctctttataataggatggccccgggncttnttttgaacaggtagtaatgacttcatttgccaccgtgctaaatgggtacacaacctattacattcaccagtccttcattataccattgacctgaggcta

SEQ ID NO: 4247 - DNA, 342 bp, Homo sapiens
  misc_feature (65)..(80): n includes a, c, g, or t, or contains no nucleotide
  misc_feature (202)..(202): n includes a, c, g, or t, or contains no nucleotide
  misc_feature (204)..(204): n includes a, c, g, or t, or contains no nucleotide
  misc_feature (215)..(216): n includes a, c, g, or t, or contains no nucleotide
  misc_feature (218)..(218): n includes a, c, g, or t, or contains no nucleotide
  misc_feature (229)..(253): n includes a, c, g, or t, or contains no nucleotide
agcaggagcctgagccttgggaacatgcgtgtgacctccacagctacctcttctatggactggtnnnnnnnnnnnnnnnncactgtgggactcttcttaacttaaattttaatttatttatactatttagtttttgtaatttattttcgatttcacagtgtgtttgtgattgtttgctctgagagttcccctgtcccctccncnttccctcacanngngtctggtgacnnnnnnnnnnnnnnnnnnnnnnnnngtaggcagtcatggcaccaaagccaccagactgacaaatgtgtatcggatgcttttgttcagggctgtgatcggcctggggaaataata

SEQ ID NO: 4248 - DNA, 294 bp, Homo sapiens
  misc_feature (33)..(33): n includes a, c, g, or t, or contains no nucleotide
  misc_feature (37)..(37): n includes a, c, g, or t, or contains no nucleotide
  misc_feature (62)..(63): n includes a, c, g, or t, or contains no nucleotide
  misc_feature (66)..(82): n includes a, c, g, or t, or contains no nucleotide
tctggaaagttcatttcctgggattcacttctnccangggattttttaaagttaatttgggnnaannnnnnnnnnnnnnnnnttattgtgagtctttgccacatttgactgaattgagctgtcatttgtacatttaaagcagctgttttggggtctgtgagagtacatgtattatatacaagcacaacagggcttgcactaaagaattgtcattgtaataacactacttggtagcctaacttcatatatgtattcttaattgcacaaaaagtcaataatttgtcaccttggggt

SEQ ID NO: 4249 - DNA, 392 bp, Homo sapiens
  misc_feature (151)..(187): n includes a, c, g, or t, or contains no nucleotide
  misc_feature (252)..(252): n includes a, c, g, or t, or contains no nucleotide
  misc_feature (262)..(262): n includes a, c, g, or t, or contains no nucleotide
  misc_feature (276)..(276): n includes a, c, g, or t, or contains no nucleotide
  misc_feature (281)..(281): n includes a, c, g, or t, or contains no nucleotide
  misc_feature (358)..(358): n includes a, c, g, or t, or contains no nucleotide
  misc_feature (364)..(364): n includes a, c, g, or t, or contains no nucleotide
  misc_feature (367)..(367): n includes a, c, g, or t, or contains no nucleotide
gagtgtcccctttgtcttcctccagcttcttgtcgggcgccggctcctgcccccgcacatacacgctggcgatgtagttggtgacccagcccacgtagagcaggcagatgatgttagtcatgccgctcaggatcacgcaagtggacatcannnnnnnnnnnnnnnnnnnnnnnnnnnnnnnnnnnnncttcctccatatagagctcccgggggcccttccttgtcgtgcgccccgaactcccccgcgctcgnaccccgtagnacgtccggagccgntgggnacctcagcacctgagtcccgaggttctccaaagcccggtccgttgccggtgtagccgcccgtgcccaagtttgcagntcctgncgntggccaacccggagagaccttgaaa

SEQ ID NO: 4250 - DNA, 407 bp, Homo sapiens
  misc_feature (129)..(161): n includes a, c, g, or t, or contains no nucleotide
ccacagtgggcaattttgacctgtcctgcccttcttagcttgaagggaaaccccagagactcttctgtcagggaaaactagggactctcttctagagccatatagttccttgggattagctcttggccnnnnnnnnnnnnnnnnnnnnnnnnnnnnnnnnnccatttcattttttaaaaaataagggaaataaatgtaattgccatttttcaaagattaagtaggaggagaggggtttcttgctctccagagcccaaagggacaaatagggactttgtttaggccaaggaaggagcggaagtagggcaactcggtcctgcgattattaatcccactccccacttattctagggcacacaaacactattttacttttttaaaatcataaaacggcagaacagatttgg

SEQ ID NO: 4251 - DNA, 179 bp, Homo sapiens
  misc_feature (61)..(115): n includes a, c, g, or t, or contains no nucleotide
aaagcaggcagcttgactgcagagtctaatcactgcactgttgcttgtggaatctagcatnnnnnnnnnnnnnnnnnnnnnnnnnnnnnnnnnnnnnnnnnnnnnnnnnnnnnnnaaaaaattgcacctgttcaaacatatgatcaactccttgatttaccatgtggaggattacaact

SEQ ID NO: 4252 - DNA, 120 bp, Homo sapiens
  misc_feature (86)..(86): n includes a, c, g, or t, or contains no nucleotide
  misc_feature (90)..(90): n includes a, c, g, or t, or contains no nucleotide
ttcatatggcagcaagaattattgccaagttagcagcttggggaaaagaactgatggaaggcagtgacttaaattactatttcaantggntaaaaactcagctgagttcacagagttcgc

SEQ ID NO: 4253 - DNA, 460 bp, Homo sapiens
  misc_feature (78)..(78): n includes a, c, g, or t, or contains no nucleotide
  misc_feature (81)..(81): n includes a, c, g, or t, or contains no nucleotide
  misc_feature (83)..(83): n includes a, c, g, or t, or contains no nucleotide
  misc_feature (223)..(223): n includes a, c, g, or t, or contains no nucleotide
  misc_feature (232)..(232): n includes a, c, g, or t, or contains no nucleotide
  misc_feature (261)..(261): n includes a, c, g, or t, or contains no nucleotide
  misc_feature (320)..(320): n includes a, c, g, or t, or contains no nucleotide
  misc_feature (351)..(351): n includes a, c, g, or t, or contains no nucleotide
  misc_feature (362)..(362): n includes a, c, g, or t, or contains no nucleotide
  misc_feature (391)..(391): n includes a, c, g, or t, or contains no nucleotide
  misc_feature (395)..(395): n includes a, c, g, or t, or contains no nucleotide
  misc_feature (410)..(410): n includes a, c, g, or t, or contains no nucleotide
  misc_feature (414)..(414): n includes a, c, g, or t, or contains no nucleotide
acatggctgcccagcctacgtgagccctgagatcctcaacaccactgggacctactccggaaaggctgcggacgtttngancntgggggtgatgctctacacccttctggttggacgataccccttccatgactcagaccccagtgcccttttctccaaaattcggcgtggacagttctgcattcctgagcacatttcccccaaagccaggtgcctcattcgnagcctcttnagacgggagccctccgagagactcactgnccccgagatcctactgcacccctggtttgagtccgtcttggaacccgggtacatcgacntcagaaataggaacttcagaccagattgttncagagtaccanggaggacagtgacattagttccttcttcntgcntaatccccaaaaccntcangaaacctcataattcttaacacctggcatttccatttctaaagatg

SEQ ID NO: 4254 - DNA, 243 bp, Homo sapiens
  misc_feature (33)..(57): n includes a, c, g, or t, or contains no nucleotide
  misc_feature (95)..(95): n includes a, c, g, or t, or contains no nucleotide
  misc_feature (97)..(97): n includes a, c, g, or t, or contains no nucleotide
atatttcctctaggttttgcttgactcaaagtnnnnnnnnnnnnnnnnnnnnnnnnncaaacagtagtaccacgtgtagcattttgaaacattantnttttttaaaaaatgctgtcttgctttagctattaatggggcattgtgaggaactgtgcaaagacatttttgttacaaacctgtgggcctgttgcaatactttaaaaataaaaaattttattccatttgcttgttttgtatagacat

SEQ ID NO: 4255 - DNA, 558 bp, Homo sapiens
  misc_feature (42)..(43): n includes a, c, g, or t, or contains no nucleotide
  misc_feature (48)..(48): n includes a, c, g, or t, or contains no nucleotide
  misc_feature (53)..(53): n includes a, c, g, or t, or contains no nucleotide
  misc_feature (64)..(64): n includes a, c, g, or t, or contains no nucleotide
  misc_feature (99)..(117): n includes a, c, g, or t, or contains no nucleotide
agttgtttcgggacgcgccgagcttcgccgctcttccagcgnntccgntgccnagagctagccngagcccggttctggggcgaaaatgcctgcccttcnnnnnnnnnnnnnnnnnnngaaggaaaaactgaaaatggaagttgagcagcttcgcaaagaagtgaagttgcagagacaacaagtgtctaaatgttctgaagaaataaagaactatattgaagaacgttctggagaggatcctctagtaaagggaattccagaagacaagaacccctttaaagaaaaaggcagctgtgttatttcataaataacttgggagaaactgcatcctaagtggaagaactagtttgttttagttttcccagataaaaccaacatgctttttaaggaaggaagaatgaaattaaaaggagactttcttaagcaccatatagatagggttatgtataaaagcatatgtgctactcatctttgctcactatgcagtcttttttaagagagcagagagtatcagatgtacaattatggaaataagaacattacttgagcatgacactt

SEQ ID NO: 4256 - DNA, 577 bp, Homo sapiens
  misc_feature (296)..(325): n includes a, c, g, or t, or contains no nucleotide
  misc_feature (369)..(385): n includes a, c, g, or t, or contains no nucleotide
  misc_feature (492)..(512): n includes a, c, g, or t, or contains no nucleotide
ttgctgaagcccaacatggtcaccccaggccatgcttgcactcagaagttttctcatgaggagattgccatggcgaccgtcacagcgctgcgccgcacagtgccccccgctgtcactgggatcaccttcctgtctggaggccagagtgaggaggaggcgtccatcaacctcaatgccattaacaagtgccccctgctgaagccctgggccctgaccttctcctacggccgagccctgcaggcctctgccctgaaggcctggggcgggaagaaggagaacctgaaggctgcgcaggnnnnnnnnnnnnnnnnnnnnnnnnnnnnnngccttgcctgtcaaggaaagtacactccgagcggtcaggctggnnnnnnnnnnnnnnnnnccctcttcgtctctaaccacgcctattaagcggaggtgttcccaggctgcccccaacactccaggccctgccccctcccactcttgaagaggaggccgcctcctggnnnnnnnnnnnnnnnnnnnnngctctttcttccctcgtgacagtggtgtgtggtgtcgtctgtgaatgctaagtccatcacccttt

SEQ ID NO: 4257 - DNA, 145 bp, Homo sapiens
gctctcacctcatcagcagtgaccagtgtggccaaagtggtcagggtggcctctggctctgccgtagttttgcccctggccaggattgctacagttgtgattggaggagttgtggccatggcggctgtgcccatggtgctcagtg

SEQ ID NO: 4258 - DNA, 223 bp, Homo sapiens
tttccttgcatcaaggacactgagaaacacagtcattgtcttaggtgttctatgggaggaagtgaatagagcctttaggaacttcctggtcaagcttatggtgcttattttgatctgggccacttccctccttccagtcatgagtaatcatcaaggagcaagttggagtgtttcaggtgtatattttgtagaacccaaaagattggagccttaacaataaaca

SEQ ID NO: 4259 - DNA, 441 bp, Homo sapiens
  misc_feature (198)..(198): n includes a, c, g, or t, or contains no nucleotide
gcattttttggtatcatgttcaaccaacatcattatgaaattaattagattcccatggccataaaatggctttaaagaatatatatatatttttaaagtagcttgagaagcaaattggcaggtaatatttcatacctaaattaagactctgacttggattgtgaattataatgatatgccccttttcttataaaaacnaaaaaaaaaataatgaaacacagtgaatttgtagagtgggggtatttgacatattttacagggtggagtgtactatatactattacctttgaatgtgtttgcagagctagtggatgtgtttgtctacaagtatgattgctgttacataacaccccaaattaactcccaaattaaaacacagttgtgctgtcaatacctcatactgctttacctttttttcctggatatctgtgtattttcaaa

SEQ ID NO: 4260 - DNA, 597 bp, Homo sapiens
  misc_feature (367)..(367): n includes a, c, g, or t, or contains no nucleotide
  misc_feature (475)..(475): n includes a, c, g, or t, or contains no nucleotide
  misc_feature (503)..(503): n includes a, c, g, or t, or contains no nucleotide
  misc_feature (508)..(509): n includes a, c, g, or t, or contains no nucleotide
  misc_feature (556)..(556): n includes a, c, g, or t, or contains no nucleotide
gacactttcttctgacataacagtgttcactagcaacctcaaacagacaccatggtgcatctgactcctgaggagaagactgctgtcaatgccctgtggggcaaagtgaacgtggatgcagttggtggtgaggccctgggcagattactggtggtctacccttggacccagaggttctttgagtcctttggggatctgtcctctcctgatgctgttatgggcaaccctaaggtgaaggctcatggcaagaaggtgctaggtgcctttagtgatggcctggctcacctggacaacctcaagggcactttttctcagctgagtgagctgcactgtgacaagctgcacgtggatcctgagaacttcaggntcttgggcaatgtgctggtgtgtgtgctggcccgcaactttggcaaggaattcaccccacaaatgcaggctgcctatcagaaggtggtggctggtgtggctaatgccntggctcacaagtaccattgagatcctgngactnntttcctgataaccataagaagaccctatttccctagattctattttntgaacttgggaacacaatgcctacttcaagggtatggcttc

SEQ ID NO: 4261 - DNA, 517 bp, Homo sapiens
agcaatgcatcaagctcagcttatctccaagattccacatatcttgaaggagatgtacgatgcagaccttttagaagaagaggtcatcatcagctggtcggaaaaggcctctaagaaatatgtctccaaagaacttgccaaagagattcgtgtcaaagcagaaccatttataaaatggttgaaggaggcagaggaagaatcttctggtggcgaagaagaagatgaagatgagaacattgaggtggtgtattcgaaggctgccagtgtaccgaaagttgagactgtaaagtcagacaacaaggatgacgacatcgatattgatgccatttaaagggatggatgcaacctagcttaacagtataatgctgcaaattttcctccattatcagccagaagtgcaacatgtatgtgcaaaagctaaaatggcttaacatcatgctacactttacactaaaaatctattactgtgagtgtgaaaaactagtggtggacacatttggatcacatttatacagtt

SEQ ID NO: 4262 - DNA, 475 bp, Homo sapiens
  misc_feature (73)..(88): n includes a, c, g, or t, or contains no nucleotide
  misc_feature (104)..(104): n includes a, c, g, or t, or contains no nucleotide
  misc_feature (274)..(288): n includes a, c, g, or t, or contains no nucleotide
  misc_feature (357)..(372): n includes a, c, g, or t, or contains no nucleotide
gccacttatggatttccacacagcatcttttcccagctccacattaagacacaggatcttaaaagtaattttnnnnnnnnnnnnnnnntatttatttatatganagtgttataaatatcaaagcttacaaatacattaatacatatcacctttgttgaagctagcaaaatggctcaaaattgagactgtagagaaaaatccatgaaataatcacgatagtcataccacaaaagatagcatagctaggtgggcctacctggtcgtatcaacacannnnnnnnnnnnnnnttcaaaaaaaaagggaaagcttgttactggaatcttatgtgcattacagtttaatttcttcttgtgacnnnnnnnnnnnnnnnnaggatcaatccggttgcatccttcaatttcccttttagaatgacttttggttttcattacagtaggctatgttagcctttattttggtggttctcaaatacct

SEQ ID NO: 4263 - DNA, 188 bp, Homo sapiens
tccagagctgagatggcataggccttagcagtaacgggtagcagcagatgtagtttcagacttggagtaaaactgtataaacaaaagaatcttccatatttatacagcagagaagctgtaggactgtttgtgactggccctgtcctggcatcagtagcatctgtaacagcattaactgtcttaaagag

SEQ ID NO: 4264 - DNA, 469 bp, Homo sapiens
agcccatgtttttggcttcctgaacctttttgcccccacttttagacataccccagagccctgtggctccccacaccctgccataggggcagtcctgccttacacatagaagcattcatgcctgctgccctgccctcaggcacagccagctgtgagctcccaggtcattggccttaccagttgtcaggagtctgtgctgtgcaccctgggttataaggaggcttaggagagaggttatgggtattggtgtctctatccccaggaatagaacttaaggggtgggaagaacaggaaaagaagctggaacacagaagagaggaggttgtgtctcttgctcatagcaagcctgtgggtagaggaaagagtgatctggtgtcgaataggaggacccatgtagattcgcagatggcctggatgggaggaagggcagacggtacatgtcccagcccacatagatgccccttgctga

SEQ ID NO: 4265 - DNA, 432 bp, Homo sapiens
  misc_feature (31)..(31): n includes a, c, g, or t, or contains no nucleotide
  misc_feature (44)..(48): n includes a, c, g, or t, or contains no nucleotide
  misc_feature (60)..(60): n includes a, c, g, or t, or contains no nucleotide
  misc_feature (62)..(62): n includes a, c, g, or t, or contains no nucleotide
  misc_feature (109)..(109): n includes a, c, g, or t, or contains no nucleotide
  misc_feature (209)..(209): n includes a, c, g, or t, or contains no nucleotide
  misc_feature (211)..(211): n includes a, c, g, or t, or contains no nucleotide
  misc_feature (237)..(264): n includes a, c, g, or t, or contains no nucleotide
aagacgttctcctctgcccgtgaggagcttncccgcagccgccnnnnncccagcctgggnancgttctccgaggcatgtgtctccctgctcaccctcgtctgggcaccntcagcatctgtggacttgagcgtccaaaaaccctgagtgtgattctgggcagccggcctggcttgaagtccgccatgaccctgggcacaggggaagcccnanccgtgggcttaggagagagggaccannnnnnnnnnnnnnnnnnnnnnnnnnnnagtgttcagaattccagccgctcatctgaacacagaaggtgtgaactgacctctaaagcagcgtgagatgggaatgatctagaaaactttggatttttgaagtaaattttaatgtttcatattaatttcttgaaaatgtattaaatgtcattgaaagccttattacgc

SEQ ID NO: 4266 - DNA, 525 bp, Homo sapiens
  misc_feature (68)..(82): n includes a, c, g, or t, or contains no nucleotide
  misc_feature (325)..(325): n includes a, c, g, or t, or contains no nucleotide
  misc_feature (412)..(413): n includes a, c, g, or t, or contains no nucleotide
  misc_feature (450)..(492): n includes a, c, g, or t, or contains no nucleotide
cgcaataacatgcagtctggagtaaacaacacaaagaaatggaagatggagtttgataccagggagcnnnnnnnnnnnnnnntgatgggttgggcatcaacggctgatcccttatccaacatggttctaaccttcagtactaaagaagatgcagtttcctttgcagaaaaaaatggatggagctatgacattgaagagaggaaggttccaaaacccaagtccaagtcttatggtgcaaacttttcttggaacaaaagaacaagagtatccacaaaataggttggcactgactatatctctgcttgactgtgaataaagtcagctntgcagtatttatagtccatgtataataaatacatctcttaatctcctaataaattggacctttaaactacaaaaaaaaaaaaaaaanngccgagctattcgtagtggggtaattagctgactgcnnnnnnnnnnnnnnnnnnnnnnnnnnnnnnnnnnnnnnnnnnntccacggttacgaagcgccgttctccaatcggg

SEQ ID NO: 4267 - DNA, 541 bp, Homo sapiens
ccgtctcactgtgtgtctcgtgtcagtaatttatatggtgttaaaatgtgtatatttttgtatgtcactattttcactagggctgaggggcctgcgcccagagctggcctcccccaacacctgctgcgcttggtaggtgtggtggcgttatggcagcccggctgctgcttggatgcgagcttggccttgggccggtgctgggggcacagctgtctgccaggcactctcatcaccccagaggccttgtcatcctcccttgccccaggccaggtagcaagagagcagcgcccaggcctgctggcatcaggtctgggcaagtagcaggactaggcatgtcagaggaccccagggtggttagaggaaaagactcctcctgggggctggctcccagggtggaggaaggtgactgtgtgtgtgtgtgtgtgcgcgcgcgacgcgcgagtgtgctgtatggcccaggcagcctcaaggccctcggagctggctgtgcctgcttctgtgtaccacttctgtgggcatggccgcttctagagcctcgaca

SEQ ID NO: 4268 - DNA, 421 bp, Homo sapiens
ggtgtcaagtcctctggtggcagttccagcgtgaggtttgtttctaccacttattccggagtaaccagataaagagatgccctctgtttcattagctctagttctcccccagcatcactaacaaatatgcttggcaagaccgaggtcgatttgtcccagccttaccggagaaaagagctatggttagttacactagctcatcctattcccccagctctttcttttctgctgtttcccaatgaagttttcagatcagtggcaatctcagttcccttgctatgaccctgctttgttctttcccgagaaacagttcagcagtgaccaccacccacatgacatttcaagcaccaccttaagccagccagagtaggaccagttagacctagggtgtggacagctccttgcatcttaacactgtgct

SEQ ID NO: 4269 - DNA, 341 bp, Homo sapiens
  misc_feature (144)..(144): n includes a, c, g, or t, or contains no nucleotide
gcgagccgttgaattggaaactgcttctagaaactctggctcagcctgtctcgggctgacccttttctgatcgtctcggcccctctgattgttcccgatggtctctctccctctgtcttttctcctccgcctgtgtccatctgnaccgttttcacttgtctcctttctgactgtccctgccaatgctccagctgtcgtctgactctgggttcgttggggacatgagattttattttttgtgagtgagactgagggatcgtagatttttacaatctgtatctttgacaattctgggtgcgagtgtgagagtgtgagcagggcttgctcctgccaaccacaat

SEQ ID NO: 4270 - DNA, 61 bp, Homo sapiens
gcacatctgtaaatctacacacggtgcctttatttccactgtgcaggttcccacttaaaaa

SEQ ID NO: 4271 - DNA, 455 bp, Homo sapiens
  misc_feature (26)..(26): n includes a, c, g, or t, or contains no nucleotide
  misc_feature (318)..(318): n includes a, c, g, or t, or contains no nucleotide
  misc_feature (339)..(347): n includes a, c, g, or t, or contains no nucleotide
  misc_feature (349)..(352): n includes a, c, g, or t, or contains no nucleotide
  misc_feature (360)..(375): n includes a, c, g, or t, or contains no nucleotide
  misc_feature (382)..(382): n includes a, c, g, or t, or contains no nucleotide
  misc_feature (387)..(388): n includes a, c, g, or t, or contains no nucleotide
  misc_feature (390)..(390): n includes a, c, g, or t, or contains no nucleotide
gactgtgtccgatgccaaggagtccntggcctccgcagatgcttcattttgacccttggctgcagtggaagtcagcacagagcagtgccctggctgtgtccctggacgggtggacttagctagggagaaagtcgaggcagcagccctcgaggccctcacagatgtctaggcaggcctcatttcatcacgcagcatgtgcaggcctggaagagcaaagccaaatctcagggaagtccttggttgatgtatctgggtctcctctggagcactctgccctcctgtcacccagtagagtaaataaacttccttggctcctgnaaaaaaaaaaaaaaaaaaaannnnnnnnnannnnaaaaaaannnnnnnnnnnnnnnngaaaaanaaaannanaaagtcttaataggccgaagtatcctttgggggtattagttgcatgcgggtataagtcgatggac

SEQ ID NO: 4272 - DNA, 245 bp, Homo sapiens
  misc_feature (103)..(103): n includes a, c, g, or t, or contains no nucleotide
  misc_feature (126)..(126): n includes a, c, g, or t, or contains no nucleotide
  misc_feature (132)..(132): n includes a, c, g, or t, or contains no nucleotide
  misc_feature (167)..(181): n includes a, c, g, or t, or contains no nucleotide
  misc_feature (207)..(207): n includes a, c, g, or t, or contains no nucleotide
aggacctctgctgctgccactgtcattgtggttaatgatggctttaaggtttattcttattcccgtatctttgagagaggaagagagtgggattgctacccanattttaatgaaggtggagctganccgtanaactctctgggagccatccaacctggctgtggctnnnnnnnnnnnnnnnatcacttcctttggcctgagtgagtnccagggtgcctagacaagaggtagcagcctgtggatgt

SEQ ID NO: 4273 - DNA, 534 bp, Homo sapiens
  misc_feature (265)..(313): n includes a, c, g, or t, or contains no nucleotide
  misc_feature (391)..(427): n includes a, c, g, or t, or contains no nucleotide
cctgctggaagctctgtgggaatcagatgaaacttgagggaattgtgactctgttccctgttcagggtcccctgcccttctatctgggagctagggaaggtatgggggaggaaagagaatggatttatagctacccttaccctcacacatacacttgaaaaaactttcagcctagccagttctagcccctgtcctcttagatatatccccctttctgggtgaactataggctctgtgcctctcagacaaattctgatctctaagnnnnnnnnnnnnnnnnnnnnnnnnnnnnnnnnnnnnnnnnnnnnnnnnnccctaagataatagcacaacaaaattcttcataaagatatttttattcacctgttccgtgctatatggaggaggccannnnnnnnnnnnnnnnnnnnnnnnnnnnnnnnnnnnngggaggattgtggggaggaggggctttgggttcctgtgtttgtgcatatgaagggagatgggggttaggtggaggaggagagcagcgtggttagctaaggttattgc

SEQ ID NO: 4274 - DNA, 268 bp, Homo sapiens
  misc_feature (97)..(97): n includes a, c, g, or t, or contains no nucleotide
  misc_feature (175)..(177): n includes a, c, g, or t, or contains no nucleotide
  misc_feature (179)..(180): n includes a, c, g, or t, or contains no nucleotide
  misc_feature (183)..(189): n includes a, c, g, or t, or contains no nucleotide
  misc_feature (192)..(200): n includes a, c, g, or t, or contains no nucleotide
actttgtggtggatcaaacatcctgtgtcagggcctgtcctcctgacaagatggaagtagataaaaatgggctcaagatgtgtgagccttgtggggnactatgtcccaaaggtgggtaggagatggtaagaagttgtaaagagacagcctttcctctgagcctgcgcagaccacnnncnntgnnnnnnnctnnnnnnnnnagcctgtgagggaacaggctctgggagccgcttccagactgtggactcgagcaacattgatggatttg

SEQ ID NO: 4275 - DNA, 526 bp, Homo sapiens
  misc_feature (26)..(26): n includes a, c, g, or t, or contains no nucleotide
  misc_feature (30)..(30): n includes a, c, g, or t, or contains no nucleotide
  misc_feature (39)..(39): n includes a, c, g, or t, or contains no nucleotide
  misc_feature (51)..(51): n includes a, c, g, or t, or contains no nucleotide
  misc_feature (73)..(73): n includes a, c, g, or t, or contains no nucleotide
  misc_feature (117)..(117): n includes a, c, g, or t, or contains no nucleotide
  misc_feature (199)..(199): n includes a, c, g, or t, or contains no nucleotide
aagctcagctgactttggagcggaancagnaagcaggantacatcacccgntcagcacagaccagccgtgagntagcaggcctgcaccacagcctctcacactcacttcttgccgtngcccaggcccctgaggccactgtcctggaggcagagacccgcaggctggatgagtccctgactcaaagtctgacatccccangggccagtcctgctacaccccagccccagcactacccaagccgcctccaggtagcagccacagccaggagcacacagacagaagactgtgtcatgggtcatggcccctccgcacacctacaggtttgccaaaggaaaagcctggctctgttaggcacccaggagccccaggtcggcgggtgttcccaggaagaggaagtaaatctgcaaccctggggaggaccccaactcacctgggaatgaggcaaattgcatttgcttgctccctatggaatcacccagaggggtgccttgccctggctgagggacatgtactgcctctcatcta

SEQ ID NO: 4276 - DNA, 313 bp, Homo sapiens
cacagtccgacgaaagatagttatatacaacattctgttttctgataacaactgtgattcaccttcagaattggccattttttttgtgagtttccttgcatcaaggacactgagaaacacagtcattgtcttaggtgttctatgggaggaagtgaatagagcctttaggaacttcctggtcaagcttatggtgcttattttgatctgggccacttccctccttccagtcatgagtaatcatcaaggagcaagttggagtgtttcaggtgtatattttgtagaacccaaaagattggagccttaacaataaaca

SEQ ID NO: 4277 - DNA, 500 bp, Homo sapiens
  misc_feature (62)..(117): n includes a, c, g, or t, or contains no nucleotide
  misc_feature (228)..(337): n includes a, c, g, or t, or contains no nucleotide
cagcctgatggatatgagcagacgtacgcagagatgcctaaggcggagaagaacgctgtctnnnnnnnnnnnnnnnnnnnnnnnnnnnnnnnnnnnnnnnnnnnnnnnnnnnnnnnngcagcttgacttctgcagctggaggaggcccctcaggccggggatctggggagggctagcccaaaacctcccgcatcgggcaggcaccccctgaagtacttccttcagggnnnnnnnnnnnnnnnnnnnnnnnnnnnnnnnnnnnnnnnnnnnnnnnnnnnnnnnnnnnnnnnnnnnnnnnnnnnnnnnnnnnnnnnnnnnnnnnnnnnnnnnnnnnnnngattcactgctctctcctacagccgccaggcctggggtcctgaaaggaccttgggtggtaaagctgtacttggtgggagtgagggcgtggggaggaaccatgcaaatcgccttccatggtttttaaatgcagtaaataacatttctggatgagacttgtttcc

SEQ ID NO: 4278 - DNA, 268 bp, Homo sapiens
  misc_feature (88)..(107): n includes a, c, g, or t, or contains no nucleotide
acggtaaccatgtgccaccgagagaccatgatcaaaaatgcagacatgtcggaagagatgcaacaggactcggtggagtgcgctattnnnnnnnnnnnnnnnnnnnncatagagaaggatattgcagctcatcttaagaaggaatttgacaagaagaacaatcccacctggcattgtatcgtggggaggaacttcggtagttacatgacacgtgaaatcaaacacttcatctacttctacctggaccaagtggccattctcttgttca

SEQ ID NO: 4279 - DNA, 453 bp, Homo sapiens
  misc_feature (137)..(151): n includes a, c, g, or t, or contains no nucleotide
  misc_feature (260)..(299): n includes a, c, g, or t, or contains no nucleotide
ctatttcagcctagaagaaaagataatgagtaaaacaaattgcgttgtttaaaggattatagtgctgcattgtctgaagttagcacctcttggactgaatcgtttgtctagactacatgtattacaaagtctctttnnnnnnnnnnnnnnnagatcatgtgcatatcatcccattgtaaagcgacttcaaaaatatgggaacacagttagttatttttacacagttctttttgtttttgtgtgtgtgtgctgtcgcttgnnnnnnnnnnnnnnnnnnnnnnnnnnnnnnnnnnnnnnnntcatttgtgagccttcattaactcgaagtgaaatggttaaaaatatttatcctgttagaataggctgcatctttttaacaactcattaaaaaacaaaacaactctggcttttgagatgacttatactaatttacattgtttaccaagctgtagt

SEQ ID NO: 4280 - DNA, 426 bp, Homo sapiens
  misc_feature (41)..(41): n includes a, c, g, or t, or contains no nucleotide
  misc_feature (169)..(169): n includes a, c, g, or t, or contains no nucleotide
  misc_feature (171)..(171): n includes a, c, g, or t, or contains no nucleotide
  misc_feature (241)..(271): n includes a, c, g, or t, or contains no nucleotide
  misc_feature (274)..(289): n includes a, c, g, or t, or contains no nucleotide
  misc_feature (383)..(398): n includes a, c, g, or t, or contains no nucleotide
ccaagtttagcaatcccatcagcagcagcaagaggaatgtntccctcctgatatcagctaattcaggactgtgagccggctcatttctgggctccatcggcacaggaggggccggatctttctccgataaaaccgtcgccctacagacccagctgtccccacgcctctntnttttgggtcaagtcttaatccctgcacctgagttggtcctccctctgcacccccaccacctcctgcccgnnnnnnnnnnnnnnnnnnnnnnnnnnnnnnnttnnnnnnnnnnnnnnnntccggggaccagcagcaatcctgggcagccagtggctcttgtagagaagacttaggatacctctctcactttctgtttcttgccgtccaccccnnnnnnnnnnnnnnnntccctctgggtccctccaaaactctggt

SEQ ID NO: 4281 - DNA, 427 bp, Homo sapiens
cacattcctagttccccgtgaacttcctttgacttattgtccccactaaaacaaaacaaaaaacttttaatgccttccacattaattagattttcttgcagtttttttatggcatttttttaaagatgccctaagtgttgaagaagagtttgcaaatgcaacaaaaatatttaattaccggttgttaaaactggtttagcacaatttatattttccctctcttgcctttcttatttgcaataaaaggtattgagccattttttaaatgacatttttgataaattatgtttgtactagttgatgaaggagttttttttaacctgtttatataattttgcagcagaagccaaattttttgtatattaaagcaccaaattcatgtacagcatgcatcacggatcaatagactgtacttattttccaataa

SEQ ID NO: 4282 - DNA, 444 bp, Homo sapiens
  misc_feature (52)..(69): n includes a, c, g, or t, or contains no nucleotide
  misc_feature (111)..(128): n includes a, c, g, or t, or contains no nucleotide
  misc_feature (206)..(225): n includes a, c, g, or t, or contains no nucleotide
  misc_feature (355)..(357): n includes a, c, g, or t, or contains no nucleotide
atctctgaaacttctcctcgagagccgagatgagcatctgcacgagatggcnnnnnnnnnnnnnnnnnnagtcactacggtgaatgattccaattgtgaccaagaacttcnnnnnnnnnnnnnnnnnnccaagctgctggtgaagtgtgtctccactcccttctatccacgtattgttgaccacctcttggctagcctccagcaannnnnnnnnnnnnnnnnnnngctgggcagacacctgcgggaggccggccatgaagccgaagccgggtctctccttctggccgtgagggggactcaccaggccttcagaaccttcagtacagccctccgcgcagcacagcactgggtgtgnnngccacctgtggccctgctccttagcagaaaaagcatctggagttgaatgctgttcccagaagcaacatgtgtatctgccgattgttc

SEQ ID NO: 4283 - DNA, 50 bp, Homo sapiens
acaattctgagttttccaattgttgaacatggtgtactgccccatttatt

SEQ ID NO: 4284 - DNA, 523 bp, Homo sapiens
  misc_feature (223)..(244): n includes a, c, g, or t, or contains no nucleotide
  misc_feature (262)..(283): n includes a, c, g, or t, or contains no nucleotide
tgtggagaactcagtgccacacctcgaactggttgtagtgggaagtcccgcgaaacccggtgcatctggcacgtggccaggagccatgacaggggcgcttgggaggggccggaggaaccgaggtgttgccagtgctaagctgccctgagggtttccttcggggaccagcccacagcacaccaaggtggcccggaagaaccagaagtgcagcccctctcacagnnnnnnnnnnnnnnnnnnnnnncctcctccctgggatggnnnnnnnnnnnnnnnnnnnnnnggagacggaatctgccgctttgtctgtccagccgtgtgtgcatgtgccgaggtgcgtcccccgttgtgcctggttcgtgccatgcccttacacgtgcgtgtgagtgtgtgtgtgtgtctgtaggtgcgcacttacctgcttgagctttctgtgcatgtgcaggtcgggggtgtggtcgtcatgctgtccgtgcttgctggtgcctcttttcagtagtgagcagcatctagtttccctggt

SEQ ID NO: 4285 - DNA, 355 bp, Homo sapiens
  misc_feature (50)..(50): n includes a, c, g, or t, or contains no nucleotide
  misc_feature (184)..(184): n includes a, c, g, or t, or contains no nucleotide
caaacataacggatgtaaggcagaaagtgatcggagaaggaatgagaaantgtgcgtgatgttaatgaaaagtcatatgcagctagagcagacccaggaaagctttctggaagagattgcatctgaggaaattcaggaaggatctttgtagattggggggagattctaaattgaaggggtgatngggtgaggggccagagggaagtctgctgtgttctcatgtaggatgtcagccctccctgcaacttctctttttggccaatgtcttttcactttcctgaccctttagaatcatccccagccagacgcaatcatggaagttgccttattgtcactggttaagaacttggcgaga

SEQ ID NO: 4286 - DNA, 570 bp, Homo sapiens
  misc_feature (296)..(296): n includes a, c, g, or t, or contains no nucleotide
  misc_feature (330)..(344): n includes a, c, g, or t, or contains no nucleotide
  misc_feature (439)..(519): n includes a, c, g, or t, or contains no nucleotide
cagggtcttgctagtgagctggaccagtgaggcctaccccacacctgggctctccacagccccatcaaagaacagagaggaggaggagggagaaatggccaccacatcaccccagagaaatttctggaatctgattgagtctccactccacaagcactcagggttccccagcagctcctgtgtgttgtgtgcaggatctgtttgcccactcggcccaggaggtcagcagtctgttcttggctgggtcaactctgcttttcccgcaacctggggttgtcgggggagcgctggcccgnacgcagtggcactgctgtggctttcagggctggnnnnnnnnnnnnnnngaagcctcctgtctccagctctctccaggacaggcccagtcctctgaggcacggcggctctgttcaagcactttatgcggcaggggaggccgccnnnnnnnnnnnnnnnnnnnnnnnnnnnnnnnnnnnnnnnnnnnnnnnnnnnnnnnnnnnnnnnnnnnnnnnnnnnnnnnnngcatttctcctcagagaagcgctgtgctaaggtgatcgaggaccagacatt

SEQ ID NO: 4287 - DNA, 462 bp, Homo sapiens
  misc_feature (337)..(361): n includes a, c, g, or t, or contains no nucleotide
  misc_feature (425)..(425): n includes a, c, g, or t, or contains no nucleotide
  misc_feature (428)..(429): n includes a, c, g, or t, or contains no nucleotide
  misc_feature (432)..(433): n includes a, c, g, or t, or contains no nucleotide
  misc_feature (435)..(436): n includes a, c, g, or t, or contains no nucleotide
gctgtgtgccccagtttgagaagtggttgcaggacaatttaaccatcgttgctggtattttcataggcattgcattgctgcagatatttgggatatgcctggcccagaatttggttagcgatatcgaagctgtcagggcgagctggtagaccccctgcaaccgctgctgcaagacactggacagacccagctttcgggaccctcccgcgtgccgaactgatcttcgagctgcatggacctaatcacagatgcagcctgcagtctcgcctaatggagctgccattaggggagtgtaaaactgggaaatgctgctcactgacagaattaaaaaaaaaannnnnnnnnnnnnnnnnnnnnnnnncgtgaatctctactgtagccatgaatttatggacagttagatgcttaccaaaaaaaaaaaaaanggnnggnngnngaccagatgtacttgaatgtgcagaa

SEQ ID NO: 4288 - DNA, 498 bp, Homo sapiens
  misc_feature (27)..(27): n includes a, c, g, or t, or contains no nucleotide
  misc_feature (64)..(64): n includes a, c, g, or t, or contains no nucleotide
  misc_feature (93)..(109): n includes a, c, g, or t, or contains no nucleotide
  misc_feature (211)..(212): n includes a, c, g, or t, or contains no nucleotide
  misc_feature (214)..(270): n includes a, c, g, or t, or contains no nucleotide
  misc_feature (281)..(281): n includes a, c, g, or t, or contains no nucleotide
  misc_feature (393)..(410): n includes a, c, g, or t, or contains no nucleotide
agcgagcaggagcacatgagcatctcnggcagtagcgcccgacacatggtgatgcagaagctgntccgcaagcaggagtctacagtgatggtnnnnnnnnnnnnnnnnnaccccaaggacatcgatgatgacctggaaggggaggtgacagaggagtgtggcaagttcggggccgtgaaccgcgtcatcatctaccaagagaaacaaggcnngnnnnnnnnnnnnnnnnnnnnnnnnnnnnnnnnnnnnnnnnnnnnnnnnnnnnnnnnnagactcataangccatccaggccctcaatggccgctggtttgctggccgcaaggtggtggctgaagtgtacgaccaggagcgttttgataacagtgacctctctgcgtgacagtggtccctcnnnnnnnnnnnnnnnnnnttccttgtttcctctgggttttatagtgatacagtggtgtccccggggccaggcgcgctctgcccagcccagcctacagtgcggataa

SEQ ID NO: 4289 - DNA, 546 bp, Homo sapiens
  misc_feature (27)..(27): n includes a, c, g, or t, or contains no nucleotide
  misc_feature (122)..(122): n includes a, c, g, or t, or contains no nucleotide
  misc_feature (256)..(290): n includes a, c, g, or t, or contains no nucleotide
  misc_feature (347)..(347): n includes a, c, g, or t, or contains no nucleotide
  misc_feature (349)..(349): n includes a, c, g, or t, or contains no nucleotide
  misc_feature (352)..(352): n includes a, c, g, or t, or contains no nucleotide
cattctcacagaaactgcatgtggaanccacaagcagccttcagcccaagagaagtctctgttaactctataggaagcttttctttggcgattcagtgtcacaaaataactccagaaagaancacttagcgtgctgttcctgtggaaaaacttcagagactacctgttttattttcctcaacatcttgaagttatgttggagagtaatcatacaattgtagagaattttggtaaaaaacagccataattctttaannnnnnnnnnnnnnnnnnnnnnnnnnnnnnnnnnnaagaaccattatcccaataaaatcttacattccaaataaagttctttttctaagaanantanatgcccttcctaaatatcaattaaccatactaattattgcacttaaaatttgaaagtcggactattttcagtattctcttaaaagactaaagtattgtatggataaagtgatataaaaagatattttcatcaagcatcatgtaaaatggttggaaatcctaagtgtgtggatttccatcctaagtgtgtggagt

SEQ ID NO: 4290 - DNA, 428 bp, Homo sapiens
atgtcatatcatttcactgtctaggctacaacaggattctaggtggaggttgtgcatgttgtcctttttatctgatctgtgattaaagcagtaatattttaagatggactgggaaaaacatcaactcctgaagttagaaataagaatggtttgtaaaatccacagctatatcctgatgctggatggtattaatcttgtgtagtcttcaactggttagtgtgaaatagttctgccacctctgacgcaccactgccaatgctgtacgtactgcatttgccccttgagccaggtggatgtttaccgtgtgttatataacttcctggctccttcactgaacatgcctagtccaacattttttcccagtgagtcacatcctgggatccagtgtataaatccaatatcatgtcttgtgcataattcttccaaag

SEQ ID NO: 4291 - DNA, 421 bp, Homo sapiens
ttgtggctgctatcatttgctgtggagatcgtcctggccttctaaacgtaggacacattgaaaaaatgcaggagggtattgtacatgtgctcagactccacctgcagagcaaccacccggacgatatctttctcttcccaaaacttcttcaaaaaatggcagacctccggcagctggtgacggagcatgcgcagctggtgcagatcatcaagaagacggagtcggatgctgcgctgcacccgctactgcaggagatctacagggacatgtactgagttccttcagatcagccacaccttttccaggagttctgaagctgacagcactacaaaggagacgggggagcagcacgattttgcacaaatatccaccactttaaccttagagcttggacagtctgagctgtaggtaaccggcatat

SEQ ID NO: 4292 - DNA, 426 bp, Homo sapiens
  misc_feature (89)..(89): n includes a, c, g, or t, or contains no nucleotide
  misc_feature (100)..(121): n includes a, c, g, or t, or contains no nucleotide
  misc_feature (181)..(181): n includes a, c, g, or t, or contains no nucleotide
  misc_feature (184)..(185): n includes a, c, g, or t, or contains no nucleotide
agagccactaatgtaagatacagaaacatagctgaggaacaaatagaccatttccatactaaaccagtttgttaactttagattttttnccaatagtgtnnnnnnnnnnnnnnnnnnnnnngtggagggcttgccatgaaaatgcaacttatttaagacatttatgagacatattaacttngtnntgtcgccttttagaaggagaaacttaagtgtggaatgcattatatgggcaaagaagctatgaagatacatgatacactttgtacaactatcctgcagcccattggttgcttatatttatcgcttggctcaagttctgccctttggagaaatactgagcaagtctttcattctctgtgtgacagccctctgaatatttgaagttgtttgttgtaacttaaggttataacagcccttagttca

SEQ ID NO: 4293 - DNA, 548 bp, Homo sapiens
  misc_feature (150)..(150): n includes a, c, g, or t, or contains no nucleotide
  misc_feature (165)..(165): n includes a, c, g, or t, or contains no nucleotide
  misc_feature (190)..(190): n includes a, c, g, or t, or contains no nucleotide
  misc_feature (209)..(321): n includes a, c, g, or t, or contains no nucleotide
  misc_feature (411)..(411): n includes a, c, g, or t, or contains no nucleotide
ttcttccctgactttagggaaggtgaatgtgttcccgtcctcccgcagtcagaaaggagactctgcctccctcctcctcactgagtgcctcatcctaccgggtgtccctttgccaccctgcctgggacatcgctggaacctgcaccatgnccaggatcatggganccaggcgagagggcaccctcccttncctcccccatgtgataaannnnnnnnnnnnnnnnnnnnnnnnnnnnnnnnnnnnnnnnnnnnnnnnnnnnnnnnnnnnnnnnnnnnnnnnnnnnnnnnnnnnnnnnnnnnnnnnnnnnnnnnnnnnnnnnnttaagagtgcagtattgcagagtctagaggaatttttgtttccttgattaacatgattttcctggttgttacatccagggcatggcagtngcctcagccttaaacttttgttcctactcccaccctcagcgaactgggcagcacggggagggtttggctacccctgcccatccctgagccaggtaccaccattgtaaggaaacactttcagaaattcagctggttcc

SEQ ID NO: 4294 - DNA, 69 bp, Homo sapiens
cccagttcatttcagccttccagtgctacacccacttcttggctgacacacttctgctctaagagtctc

SEQ ID NO: 4295 - DNA, 373 bp, Homo sapiens
gaggacccaggaaaggcaggattgaaaatgtccaggaaagtggccaagaagcagtggccttattgcatcccaaaccacgcctcttgaccaggctgcctcccttgtggcagcaacggcacagctaattctactcacagtgcttttaagtgaaaatggtcgagaaagaggcaccgggaagccgtcctggcgcctggcagtccgtgggacgggatggttctggctgtttgagattctcaaaggagcgagcatgtcgtggacacacacagactatttttagattttcttttgccttttgcaaccaggaacagcaaatgcaaaaactctttgagagggtaggagggtgggaaggaaacaaccatgtcatttcagaagt

SEQ ID NO: 4296 - DNA, 368 bp, Homo sapiens
  misc_feature (281)..(296): n includes a, c, g, or t, or contains no nucleotide
tccaaagttgtttccagaaattggttctatttcttcttatccacctactccattgctttatgaggtttaaggaaggaaggcggtataatccctattcaatatattttttctaaaatccaacttctgaccgcccagtaggaagaaaaatgagacattttttccattacagagaaatgcttcttgactttaacatcagcattataaaaagtgtcaaataaaaaattaccatcattatcattaaaataaattttcactgtatttgagatgggagggttaaggcnnnnnnnnnnnnnnnnagtgaactgctggaactcacacatgccctgatatgtaaatgatgatttatgttggcgagtctgagagcaagc

SEQ ID NO: 4297 - DNA, 556 bp, Homo sapiens
  misc_feature (60)..(61): n includes a, c, g, or t, or contains no nucleotide
  misc_feature (70)..(73): n includes a, c, g, or t, or contains no nucleotide
  misc_feature (120)..(120): n includes a, c, g, or t, or contains no nucleotide
  misc_feature (162)..(179): n includes a, c, g, or t, or contains no nucleotide
  misc_feature (202)..(219): n includes a, c, g, or t, or contains no nucleotide
  misc_feature (292)..(292): n includes a, c, g, or t, or contains no nucleotide
  misc_feature (418)..(418): n includes a, c, g, or t, or contains no nucleotide
ccccaacggagacctggggatgccggtggaggcgggagcggaaggcgaggaggacggctnnggggaagcnnnnagaatacgctgccatcaactccatgctggaccagatcaactcctgtntggaccacctggaggagaagaatgaccacctccacgcccgcnnnnnnnnnnnnnnnnnntccaaccggcagacacgcctggnnnnnnnnnnnnnnnnnngggaggcccccagtgatgccagcccctaggctccaagagcccccaaccgggacccaaccctgcctccctgggntaggctctggcctgggcactcaccccctggcttagacaccttctcaagggctggccttcagggacccctggtgggtctgcctgcctgggccacccttcctgcctgggcctccccttggcctacctnggccagcccccaccacctggcatgccctcctggggccaagagtgggcctgcaacccacccacttgcctgcccacccaactcctgggcgctccccactctgcccaggccttgagtgtccacattaaatgggtctcccac

SEQ ID NO: 4298 - DNA, 82 bp, Homo sapiens
tgcagactgagtgctgcccttgtagcttccccagaccccaactcactgcagttcatctgaacaacctgagctcctgggccgg

SEQ ID NO: 4299 - DNA, 190 bp, Homo sapiens
  misc_feature (97)..(97): n includes a, c, g, or t, or contains no nucleotide
  misc_feature (104)..(104): n includes a, c, g, or t, or contains no nucleotide
tcatgcacgccctgaagatgacctggcacgtgcactgctttacctgtgctgcctgcaagacgcccatccggaacagggccttctacatggaggaggncgtgccntattgcgagcgagactatgagaagatgtttggcacgaaatgccatggctgtgacttcaagatcgacgctggggaccgcttcctgga

SEQ ID NO: 4300 - DNA, 567 bp, Homo sapiens
  misc_feature (49)..(49): n includes a, c, g, or t, or contains no nucleotide
  misc_feature (53)..(53): n includes a, c, g, or t, or contains no nucleotide
  misc_feature (312)..(335): n includes a, c, g, or t, or contains no nucleotide
  misc_feature (337)..(338): n includes a, c, g, or t, or contains no nucleotide
  misc_feature (340)..(340): n includes a, c, g, or t, or contains no nucleotide
  misc_feature (343)..(343): n includes a, c, g, or t, or contains no nucleotide
  misc_feature (345)..(345): n includes a, c, g, or t, or contains no nucleotide
  misc_feature (347)..(347): n includes a, c, g, or t, or contains no nucleotide
  misc_feature (349)..(350): n includes a, c, g, or t, or contains no nucleotide
  misc_feature (352)..(355): n includes a, c, g, or t, or contains no nucleotide
tgattaccagtgtcgggcctgcatgctgcccccgacacacgcacgcacngcgnacacacgtgtgcacatgggccatagccacaagccagctctcctccagggtcctttcaacctcgctgtccagggaccctgtccttcttgcccgtggggcttccatctggcagagaacgttcagggcttgttgaacttgaaagctcattagacttaagctgtcacctgtgcttggtgccccaggaacagccagagaggacagtgcccactcacttcttgttggcagcctcctgtgcaggaagtgccagccgggcctcgacnnnnnnnnnnnnnnnnnnnnnnnngnngnggngngngnngnnnncgctcagtgcagatggggactcctctcctctgccctgaccttaccctccattacctccttcactggagtggggctggggggtgggtggaatcagtgttttaatcggatttttaaaaaacattttatttctttgtacaattaccatcctatgtaaagatgaaatttgtgttgagttgaagattgtcatggaataaagatcacaccgtacttga

SEQ ID NO: 4301 - DNA, 611 bp, Homo sapiens
gtccccaagactcacctagagctaaagaaattaattggagaggtgtccagtggctccggggagacgttcagctaccctgactttctcaggatgatgctgggcaagagatctgccatcctaaaaatgtgagtgtcaatttccaacctcccctgtacttacctgttttctcctcccccatccctacccttgtccacaggctcaacatttctacacgttgcccatcatcccttcttccatccttagagggacccttccaaggtcccgaccccatccctatccatagtcctggtccccagaaactccaacccctgcccttcctcttcccccttccaccctcacatccccatccccttctagcctttcctagcaccctatgatttattcccttgagaggagtgttccctgatccctgtgcctcttcccatctcaaccaggatcctgatgtatgaggaaaaagcgagagaaaaggaaaagccaacaggccccccagccaagaaagctatctctgagttgccctgatttgaagggaaaagggatgatgggattgaaggggcttctaatgacccagatatggaaacagaagacaaaattgtaagccagagtcaacaaat

SEQ ID NO: 4302 - DNA, 485 bp, Homo sapiens
  misc_feature (33)..(54): n includes a, c, g, or t, or contains no nucleotide
  misc_feature (97)..(137): n includes a, c, g, or t, or contains no nucleotide
cacgtcaaaagcaatgataggcatttgcagtgnnnnnnnnnnnnnnnnnnnnnnaatcacggaagcaggatagaaatccagctgcagacaagacctnnnnnnnnnnnnnnnnnnnnnnnnnnnnnnnnnnnnnnnnntactcacctaggacagtcaggcagaagtatgcaaaatgactggggctgattcttttctgaattgtcgcaaacagcaagaggacttgagtcctagcattaaagagttcaacatgtctaggtccaagaccactgttgtgtttgaaggatgtaaaaccctgctgcataggatggaatatttggagggaggatcctgaaaaacatgagggatcaaatagtcctcaactttctaggacaaagggagcagctatttgccatctaccctccagaataaagaaatcttatcattcaccatctaccctctagaataaagaaatcttatcattcgccatctaccctgtagaataaaga

SEQ ID NO: 4303 - DNA, 194 bp, Homo sapiens
atctggcatttttccaagccaagagaagatcgaatggctttttgcagctaactactatgtgtagacaggttttatattataaagtatgcattcttatcacctagtatatagttagtttgtagagtgatttccccccagtttcttgaacatggtatcttcacatcttggaccttggtcagttgtgctattcatta

SEQ ID NO: 4304 - DNA, 351 bp, Homo sapiens
  misc_feature (203)..(203): n includes a, c, g, or t, or contains no nucleotide
  misc_feature (211)..(212): n includes a, c, g, or t, or contains no nucleotide
  misc_feature (223)..(223): n includes a, c, g, or t, or contains no nucleotide
  misc_feature (233)..(233): n includes a, c, g, or t, or contains no nucleotide
  misc_feature (245)..(245): n includes a, c, g, or t, or contains no nucleotide
  misc_feature (247)..(247): n includes a, c, g, or t, or contains no nucleotide
  misc_feature (254)..(254): n includes a, c, g, or t, or contains no nucleotide
  misc_feature (261)..(261): n includes a, c, g, or t, or contains no nucleotide
  misc_feature (291)..(291): n includes a, c, g, or t, or contains no nucleotide
ctgacttttgttaaattcagtaatgcagtttttaaaaacctgtatctgacccactttgtaatttttgctccaatatccattctgtagacttttgaaaaaaaagtttttaatttgatgcccaatatattctgaccgttaaaaaattcttgttcatatgggagaagggggagtaatgacttgtacaaacagtatttctggtgtanattttaanngtttttaaaangagtaatttncatttaaatatncngttattncaaattngatgatgttaaatgtaatataatgtatttnctttttattttgcactctgtaattgcactttttaagtttgaagagccattttggtaaacg

SEQ ID NO: 4305 - DNA, 567 bp, Homo sapiens
  misc_feature (143)..(145): n includes a, c, g, or t, or contains no nucleotide
  misc_feature (241)..(244): n includes a, c, g, or t, or contains no nucleotide
  misc_feature (247)..(250): n includes a, c, g, or t, or contains no nucleotide
  misc_feature (252)..(260): n includes a, c, g, or t, or contains no nucleotide
  misc_feature (282)..(286): n includes a, c, g, or t, or contains no nucleotide
  misc_feature (288)..(294): n includes a, c, g, or t, or contains no nucleotide
tacacgacttgagttttgaaccccgattaatgtctgtacgtcacctttcctagttctgaccctgagccctggggaacaggaaagcgtggctggcctcttgcactgctttgtctccaaaataaactactgaaatcaaaccgcannncacacgtgtttacacatgttgctcaagtttgttatgtcatactcccagtccttaaaagacgtttaataaaacagctttaccttttaaaaataaaannnnaannnnannnnnnnnnaggtacgggtgggggtgtgcannnnnannnnnnnctgtgttcctgtaccgtttgtggcctccggggtcttgcgcgtccagggcccagataccgagtaactgccatgtggtgtcgtggtggcgtccataggcctccgtggtggggcgggggcggggctgtgggtgtgcagggcagctgcattttccaagagtggagatggaggatggagatttgcttcgtaaaggcctgggagctacatgggaggtagggaggggccagccacacacagggctggggggccggtggactctgcccagtgaagccaggg

SEQ ID NO: 4306 - DNA, 451 bp, Homo sapiens
  misc_feature (43)..(43): n includes a, c, g, or t, or contains no nucleotide
  misc_feature (99)..(99): n includes a, c, g, or t, or contains no nucleotide
  misc_feature (115)..(116): n includes a, c, g, or t, or contains no nucleotide
  misc_feature (121)..(121): n includes a, c, g, or t, or contains no nucleotide
  misc_feature (269)..(269): n includes a, c, g, or t, or contains no nucleotide
ttacctttggcatcctttggcctggtggggaaacagaggcccnagggtggagacctaagcgggtataagaccaggtggcctgctccttttctgggcccntagcacaggtgggtannccccnacccaacccagctcctgctgctgtcccagtcttgggctggggcctggaaagaggaagaggctgcctggggctgggccagcccgctgtgcactttgaccccagttccttgccagcacggctgctaacagactgccacttgagtgcgccnttgcaggcactcccagagcagccatggaaggagctggccctcacaccatccacctccacactgcctcctggccagctgcccaccccagtgccaggtgggagagggagcagaacagccagccccttccaggtggcagtcggaagggtttttgtttttgtttctgttgccatttgtgtaaatac

SEQ ID NO: 4307 - DNA, 378 bp, Homo sapiens
gcagagtccccatggcatggagcttacacctgactgactggagccccctccccgactcccacttccagaagctaggagggagggatacctggaagactccggtcacctccttcttgctcagggcctaaaagatgctggtcctcccaacctcactctcagactccctgccaccttttcccctgggttctgccgtcttgcctcacttcccctcctgtcacatgctgacgttggacttagcaggttctaaggccacatgtgtgacctctctgacttctcttcctccaccaaggcagctttccttaccctgacacagccccagaccccacaaagccttctggacctggaaagcctggggaaggactgacagaccccaggacc

SEQ ID NO: 4308 - DNA, 547 bp, Homo sapiens
agaccgaggcgcatagagaccgagcacagcccagctgggctaggcccggtgggaaggagagcgtcgttaatttatttcttattgctcctaattaatatttatatgtatttatgtacgtcctcctaggtgatgagatgtgtacgtaatatttattttaacttatgcaagggtgtgagatgttccccctgctgtaaatgcaggtctcttggtatttattgagctttgtgggactggtggaagcaggacacctggaactgcggcaaagtaggagaagaaatggggaggactcgggtgggggaggacgtcccggctgggatgaagtctggtggtgggtcgtaagtttaggaggtgactgcatcctccagcattctcaactccgtctgtctactgtgtgagacttcggcggaccattaggaatgagatccgtgagatccttccatcttcttgaagtcgcctttagggtggctgcgaggtagagggttgggggttggtgggctgtcacggagcgactgtcgagatcgcctagtatgttctgtgaacacaaata

SEQ ID NO: 4309 - DNA, 535 bp, Homo sapiens
cataattgctgttctgctgaatcaaatctcttccacatgggtgcatttgtagctctggacctgtctctacctaaggacaagacactgaggagatactgaacattttgcaaaacttatcacgcctacttaagagtgctgtgtaacccccagttcaagacttagctcctgttgtcatgacggggacagagtgagggaatggtagttaaggcttcttttttgcccccagatacatggtgatggttagcatatggtgcttaaaaggttaaatttcaagcaaaatgcttacagggctaggcagtaccaaagtaactgaattatttcaggaaggtcttcaatcttaaaacaaattcattattctttttcagttttacctcttctctctcagttctacactgatacacttgaaggaccatttactgtttttttctgtagcaccagagaatccatccaaagttccctatgaaaaatgtgttccattgccatagctgactacaaattaaagttgaggaggtttctgcatagagtctttatgtcc

SEQ ID NO: 4310 - DNA, 405 bp, Homo sapiens
tggctggcctaaaaacctaaatatatgatgaagattgtaggactgtcttcccaagccccatgttcatggtggggcaatggttatttggttattttactcaattggttactctcatttgaaatgagggagggacatacagaataggaacaggtgtttgctctcctaagagccttcatgcacacccctgaaccacgaggaaacagtacagtcgctagtcaagtggtttttaaagtaaagtatattcataaggtaacagttattctgttgttataaaactatacccactgcaaaagtagtagtcaagtgtctaggtctttgatattgctcttttggttaacactaagcttaagtagactatacagttgtatgaatttgtaaaagtatatgaacacctagtgagatttc

SEQ ID NO: 4311 - DNA, 367 bp, Homo sapiens
  misc_feature (81)..(101): n includes a, c, g, or t, or contains no nucleotide
  misc_feature (314)..(314): n includes a, c, g, or t, or contains no nucleotide
ggccctctctgaaaacagtggcatgaatcccatccagactatgaccgaagtccgagccagacaggtgaaggagatgaaccnnnnnnnnnnnnnnnnnnnnntgcacaaggggacaaatgatatgaagcaacagcatgtcatagaaaccttgattggcaaaaagcaacagatatctcttgcaacacaaatggttagaatgattttgaagattgatgacattcgtaagcctggagaatctgaagaatgaagacattgagaaaactatgtagcaagatccacttctgtgattaagtaaatggatgtctcgtgatgcntctacagttatttattgttacatccttttccagacactgtagatgctataata

SEQ ID NO: 4312 - DNA, 133 bp, Homo sapiens
  misc_feature (35)..(35): n includes a, c, g, or t, or contains no nucleotide
cagaacccagctttgggtccggcctcccgctgccnccagggggcgcggggccggaggacccttctctttcggtgaccctggccgacatctaccgggagctctacgccttcttcggtgacagcttggccacacg

SEQ ID NO: 4313 - DNA, 191 bp, Homo sapiens
ggggtaatcaccttaaaatgtcatcaaaaatagatctactagaaggcagcatcacattcccatcttacttatggactcctacccctggttcatgtcttatatgcctgtaatggttataaagcctaccttcaggaaagctatggttgactaattactaatggatgggttttaaacatgtccctctacaataa

SEQ ID NO: 4314 - DNA, 458 bp, Homo sapiens
  misc_feature (30)..(103): n includes a, c, g, or t, or contains no nucleotide
atattggggtagctttcatttcttccattnnnnnnnnnnnnnnnnnnnnnnnnnnnnnnnnnnnnnnnnnnnnnnnnnnnnnnnnnnnnnnnnnnnnnnnnnncattgttaacattaaggaaagctggcagaagggtgtgcataaattctatactctttttgaaacttttctataattctaaaattattttttaaagttaaacagtatattaagattaccttcactattcctcactcaagattaagacattttttgaaaagcagtagagtttgcttaaaatacaaattaattattcttgactataaccttgtaaaggtaaatctaatgtataaatttttgaaaaattttgcaccactggtcatagcatctatctcctttgccttaatttactgaaatacatcattttattcggttcaattgaaataaagctatgtctttactatgtattggccctacc

SEQ ID NO: 4315 - DNA, 527 bp, Homo sapiens
  misc_feature (30)..(30): n includes a, c, g, or t, or contains no nucleotide
  misc_feature (130)..(130): n includes a, c, g, or t, or contains no nucleotide
  misc_feature (144)..(144): n includes a, c, g, or t, or contains no nucleotide
  misc_feature (310)..(326): n includes a, c, g, or t, or contains no nucleotide
  misc_feature (418)..(418): n includes a, c, g, or t, or contains no nucleotide
gcttagcgctctggacagatggacgcaggncctgtccagcccccagtgcgctcgttccggtccccacagactgccccagccaacgagattgctggaaaccaagtcaggccaggtgggcggacaaaagggnccaggtgcggcctnggggggaacggatgctccgaggactggactgtttttttcacacatcgttgccgcagcggtgggaaggaaaggcagatgtaaatgatgtgttggtttacagggtatatttttgataccttcaatgaattaattcagatgttttacgcaaggaaggacttacccagtnnnnnnnnnnnnnnnnnttttgatctctgcttaccgttcaagaggcgtgtgcaggccgacagtcggtgaccccatcactcgcaggaccaagggggcggggactgctggntcacgccccgctgtgtcctccctccctcccttccttgggcagaatgaattcgatgcgtattctgtggccgccatctgcgcagggtggtggtattctgtcatttacacac

SEQ ID NO: 4316 - DNA, 469 bp, Homo sapiens
  misc_feature (37)..(37): n includes a, c, g, or t, or contains no nucleotide
  misc_feature (40)..(42): n includes a, c, g, or t, or contains no nucleotide
  misc_feature (60)..(60): n includes a, c, g, or t, or contains no nucleotide
  misc_feature (90)..(90): n includes a, c, g, or t, or contains no nucleotide
  misc_feature (201)..(202): n includes a, c, g, or t, or contains no nucleotide
  misc_feature (241)..(247): n includes a, c, g, or t, or contains no nucleotide
  misc_feature (249)..(252): n includes a, c, g, or t, or contains no nucleotide
  misc_feature (254)..(258): n includes a, c, g, or t, or contains no nucleotide
  misc_feature (260)..(274): n includes a, c, g, or t, or contains no nucleotide
  misc_feature (277)..(277): n includes a, c, g, or t, or contains no nucleotide
  misc_feature (280)..(280): n includes a, c, g, or t, or contains no nucleotide
  misc_feature (283)..(283): n includes a, c, g, or t, or contains no nucleotide
  misc_feature (285)..(293): n includes a, c, g, or t, or contains no nucleotide
  misc_feature (295)..(309): n includes a, c, g, or t, or contains no nucleotide
  misc_feature (312)..(318): n includes a, c, g, or t, or contains no nucleotide
  misc_feature (320)..(330): n includes a, c, g, or t, or contains no nucleotide
  misc_feature (333)..(339): n includes a, c, g, or t, or contains no nucleotide
  misc_feature (421)..(422): n includes a, c, g, or t, or contains no nucleotide
taggagctaggtgaccctcggctgctgcagggatctncannnactgcagccatgggggcncacctggtccggcgctacctgggcgatgcntcggtggagcccgaccccctgcagatgccaaccttcccgccagactacggcttccccgaacgcaaggagcgcgagatggtggccacacagcaggagatgatggacgcgcanntgaggctccagctgcgggactactgcgcccaccacctcnnnnnnntnnnnannnnnannnnnnnnnnnnnnnccnaanttncnnnnnnnnnannnnnnnnnnnnnnngannnnnnntnnnnnnnnnnnccnnnnnnntgtgatgcgcatgaaggagtttgagcgggagcggaggctgctccagcggaagaagcggcgggagaagaaggcggcagagttnnccaaaggccagggacccggggaagtggaccccaaggtggccctgtag

SEQ ID NO: 4317 - DNA, 337 bp, Homo sapiens
  misc_feature (75)..(76): n includes a, c, g, or t, or contains no nucleotide
  misc_feature (79)..(81): n includes a, c, g, or t, or contains no nucleotide
  misc_feature (90)..(94): n includes a, c, g, or t, or contains no nucleotide
  misc_feature (98)..(100): n includes a, c, g, or t, or contains no nucleotide
  misc_feature (123)..(123): n includes a, c, g, or t, or contains no nucleotide
  misc_feature (134)..(134): n includes a, c, g, or t, or contains no nucleotide
  misc_feature (136)..(136): n includes a, c, g, or t, or contains no nucleotide
  misc_feature (147)..(147): n includes a, c, g, or t, or contains no nucleotide
  misc_feature (155)..(155): n includes a, c, g, or t, or contains no nucleotide
  misc_feature (159)..(159): n includes a, c, g, or t, or contains no nucleotide
  misc_feature (161)..(161): n includes a, c, g, or t, or contains no nucleotide
  misc_feature (181)..(181): n includes a, c, g, or t, or contains no nucleotide
  misc_feature (188)..(188): n includes a, c, g, or t, or contains no nucleotide
  misc_feature (221)..(221): n includes a, c, g, or t, or contains no nucleotide
acaacaaaccaggtagcaggatagagactcattctcatctattttggttaaaagaaaataaatgtatttcttccnnaannnaaaaaaaannnnnaaannnataactaatatccctcgtcagcnccgctgactcnanccctgccacanggaggttncacnancaagagcacagaaactaggnccagtgncccggttgtgtgaccttgagtaagttctttttncccttgaacagggagagagacacaatggatcagagtgtctctgccagttctaacttggggattctagtgggttgaaccgaacggtagtccgtttccaaaagaggaagccaagacca

SEQ ID NO: 4318 - DNA, 296 bp, Homo sapiens
  misc_feature (44)..(45): n includes a, c, g, or t, or contains no nucleotide
  misc_feature (76)..(85): n includes a, c, g, or t, or contains no nucleotide
  misc_feature (176)..(176): n includes a, c, g, or t, or contains no nucleotide
tctgtccatcagtgcatgacgtttaaggccacgtatagtcctanntgacgccaataataaaaaacaagaaaccaannnnnnnnnnattctctctatgcaaaatgtctgttttagttggaatgactgaaagaagaacagctgttcctgtgttcttcgtatatacacacaaaaaggancgggcagggccgctcgatgcctttgctgtttagcttcctccagaggaggggacttgtaggaatctgccttccagcccagacccccagtgtattttgtccaagttcacagtagagtagggt

SEQ ID NO: 4319 - DNA, 451 bp, Homo sapiens
ttctactttttgatctgacaaatgagcaaagtttcctcaatgtcagaaactggataagccagctacagatgcatgcatattgtgaaaacccagatatagtgctgtgtggaaacaagagtgatctggaggaccagagagtagtgaaagaggaggaagccatagcactcgcagagaaatatggaatcccctactttgaaactagtgctgccaatgggacaaacataagccaagcaattgagatgcttctggacctgataatgaagcgaatggaacggtgtgtggacaagtcctggattcctgaaggagtggtgcgatcaaatggtcatgcctctacggatcagttaagtgaagaaaaggagaaaggggcatgtggctgttgagaagtcaagtaacgacatagtagttcaggtggcccatgcctgggatcttctctatgattgatacatggcac

SEQ ID NO: 4320 - DNA, 540 bp, Homo sapiens
  misc_feature (280)..(281): n includes a, c, g, or t, or contains no nucleotide
  misc_feature (362)..(362): n includes a, c, g, or t, or contains no nucleotide
  misc_feature (364)..(364): n includes a, c, g, or t, or contains no nucleotide
  misc_feature (379)..(379): n includes a, c, g, or t, or contains no nucleotide
  misc_feature (381)..(384): n includes a, c, g, or t, or contains no nucleotide
  misc_feature (386)..(391): n includes a, c, g, or t, or contains no nucleotide
  misc_feature (455)..(457): n includes a, c, g, or t, or contains no nucleotide
  misc_feature (469)..(483): n includes a, c, g, or t, or contains no nucleotide
tggaagcttgtgcacattcattttttgatgaattacgggacccaaatgtcaaactaccaaatgggcgagacacacctgcactcttcaacttcaccactcaagaactgtcaagtaatccacctctggctaccatccttattcctcctcatgctcggattcaagcagctgcttcaacccccacaaatgccacagcagcgtcagatgctaatactggagaccgtggacagaccaataatgctgcttctgcatcagcttccaactccacctgaacagtcccgannagccagctgcacaggaaaaaccaccagttacttgagtgtcactcagcaacactggtcacgtttggaaagaatattaaaaananaaaaaaatcctgttnannnnannnnnnaatttttttattattattgttgttcttatttaaccttgtaaaatatctataaatacaaaccaannncattgtattctnnnnnnnnnnnnnnnccagggggtgggaggggttgtggggagggggaaagcggagcactagaacatacaatc

SEQ ID NO: 4321 - DNA, 229 bp, Homo sapiens
  misc_feature (34)..(67): n includes a, c, g, or t, or contains no nucleotide
tcttttgtaatatcaagcaggaccctaagatgannnnnnnnnnnnnnnnnnnnnnnnnnnnnnnnnnaaatgtagcacttacgtaaaacatttgtttcccccacagttttaataagaacagatcaggaattctaaataaatttcccagttaaagattattgtgacttcactgtatataaacatatttttatactttattgaaaggggacacctgtacattcttccatca

SEQ ID NO: 4322 - DNA, 117 bp, Homo sapiens
  misc_feature (66)..(86): n includes a, c, g, or t, or contains no nucleotide
taaatgccatgtggagatagagccccagatgtttcagccatctcagcccaggcaccagacaagtgnnnnnnnnnnnnnnnnnnnnnatgtagccccagcagatgtgatatagagaag

SEQ ID NO: 4323 - DNA, 524 bp, Homo sapiens
  misc_feature (27)..(27): n includes a, c, g, or t, or contains no nucleotide
  misc_feature (48)..(48): n includes a, c, g, or t, or contains no nucleotide
  misc_feature (53)..(53): n includes a, c, g, or t, or contains no nucleotide
  misc_feature (69)..(69): n includes a, c, g, or t, or contains no nucleotide
  misc_feature (100)..(100): n includes a, c, g, or t, or contains no nucleotide
  misc_feature (152)..(152): n includes a, c, g, or t, or contains no nucleotide
  misc_feature (161)..(162): n includes a, c, g, or t, or contains no nucleotide
  misc_feature (408)..(410): n includes a, c, g, or t, or contains no nucleotide
aggggactctatcagaactggaccatntccaagtatataacgatgagncctcntaatgctaggagtagnaaatggtcctaggaaggggactgaggattgnggtggggggtggggtggaaaagaaagtacagaacaaaccctgtgtcactgtncccaagttnngctaagtgaacagaactatctcagcatcagaatgagaaagcctgagaagaaagaaccaaccacaagcacacaggaaggaaagcgcaggaggtgaaaatgctttcttggccagggtagtaagaattagaggttaatgcagggactgtaaaaccaccttttctgcttcaatatctaattcctgtgtagctttgttcattgcatttattaaacaaatgttgtataaccaatactaaatgtactactgannntcgctgagttaagttatgaaactttcaaatccttcatcatgtcagttccaatgaggtggggatggagaagacaattgttgcttatgaaagaaagctttagctgtctctgttttg

SEQ ID NO: 4324 - DNA, 313 bp, Homo sapiens
ggttgaatgtttgtccttaggataggcctatgtgctagcccacaaagaatattgtctcattagcctgaatgtgccataagactgaccttttaaaatgttttgagggatctgtggatgcttcgttaatttgttcagccacaatttattgagaaaatattctgtgtcaagcactgtgggttttaatatttttaaatcaaacgctgattacagataatagtatttatataaataattgaaaaaaattttcttttgggaagagggagaaaatgaaataaatatcattaaagataactcaggagaatcttctttacaa

SEQ ID NO: 4325 - DNA, 395 bp, Homo sapiens
  misc_feature (107)..(144): n includes a, c, g, or t, or contains no nucleotide
  misc_feature (159)..(182): n includes a, c, g, or t, or contains no nucleotide
  misc_feature (199)..(285): n includes a, c, g, or t, or contains no nucleotide
gcagcacacttgctccacgttatttttgatcatgtccacgatggtgtcgatggtctggctgatggcctcctctgcgtcgcggctctggccccagtcagccgccgtgnnnnnnnnnnnnnnnnnnnnnnnnnnnnnnnnnnnnnncagacgcggctccannnnnnnnnnnnnnnnnnnnnnnnagaagactttgacgccnnnnnnnnnnnnnnnnnnnnnnnnnnnnnnnnnnnnnnnnnnnnnnnnnnnnnnnnnnnnnnnnnnnnnnnnnnnnnnnnnnnnnnncaggtacttattctccttcaggtgggagccccccacgaggagctgctccagccccttcttgatagcgcagtcggtgtaggtgcccttcccaaagtacttgaccgcgtcca

SEQ ID NO: 4326 - DNA, 198 bp, Homo sapiens
ttcatgtgtgtgagtttgctggttgtaaatactttgtcctaagagatttatctttatacagattttctagaaatgtttaggttactaaaacagggtgggcaaactctctaaactggtacaattttataggtgaaagaaaaaattccctcatttaaacccaatcagatgcctcagagggtagccttgatttgttcttac

SEQ ID NO: 4327 - DNA, 469 bp, Homo sapiens
  misc_feature (282)..(298): n includes a, c, g, or t, or contains no nucleotide
atacaaccatcaatgagatcgaagacactttccggcaatttctaaaccgggatgacattggcatcatcctcatcaaccagtacatcgcagagatggtgcggcatgccctggacgcccaccagcagtccatccccgctgtcctggagatcccctccaaggagcacccatatgacgccgccaaggactccatcctgcgcagggccaggggcatgttcactgccgaagacctgcgctaggggactcctcatagccctcagcccttccctcgtttccaggcctctnnnnnnnnnnnnnnnnngccttctttactttttgagcctctgatttccaattccctgctccttcccactccattaagaggctaggtgaggcgcttctaggttgctggggctctgctggttaaggaacaggaagcctgaccatctccctccactacctcttccctgtgctgttacacagtgtcattgtt

SEQ ID NO: 4328 - DNA, 534 bp, Homo sapiens
  misc_feature (35)..(63): n includes a, c, g, or t, or contains no nucleotide
  misc_feature (93)..(93): n includes a, c, g, or t, or contains no nucleotide
  misc_feature (125)..(125): n includes a, c, g, or t, or contains no nucleotide
  misc_feature (134)..(134): n includes a, c, g, or t, or contains no nucleotide
  misc_feature (141)..(141): n includes a, c, g, or t, or contains no nucleotide
  misc_feature (153)..(153): n includes a, c, g, or t, or contains no nucleotide
  misc_feature (172)..(172): n includes a, c, g, or t, or contains no nucleotide
  misc_feature (218)..(218): n includes a, c, g, or t, or contains no nucleotide
  misc_feature (238)..(239): n includes a, c, g, or t, or contains no nucleotide
  misc_feature (246)..(247): n includes a, c, g, or t, or contains no nucleotide
  misc_feature (330)..(331): n includes a, c, g, or t, or contains no nucleotide
  misc_feature (503)..(503): n includes a, c, g, or t, or contains no nucleotide
  misc_feature (506)..(506): n includes a, c, g, or t, or contains no nucleotide
ggtgccctcctttgagctgctgccgtcctctgccnnnnnnnnnnnnnnnnnnnnnnnnnnnnncgtgtccttctcccttgccagctgctcctngggtcgtcttcagaagctcctgcagtctcgtnggcggcgcngccccanggtcacttgttnaacttcttctctttttctnagtctctccttcagctgtgaggcctcctctgtttctgaagactctnagggggccggctgtgcggannttctccnnaattcttcttgtaaccgacatgccgaggtctgagcctcctcaaactcggccgtgagcttctgccgctgtgtctgctcatcctnnccaggatggcttctgtccactccagctgcgtcttcagctgaacggggtcctgctcggctgggggcgcctctggggaggaagctggggccccagctatgtcaccatcctctacgtggctcttcatttcactcaactgctgcctgaccagggcaagctcatcgctctgtttctnggnttcgctcttggcggcatcgagctgagat

SEQ ID NO: 4329 - DNA, 424 bp, Homo sapiens
acaggaggaccaggattggaacaagtgttgacctctcatgtttactttgtttcagaattggggggttctatgctctttccccataccccggtctccgcctcatctctctcaatatgaatttttgttcccgtgagaacttctggctcttgatcaactccacggatcccgcaggacagctccagtggctggtgggggagcttcaggctgctgaggatcgaggagacaaagtgagggccagtagtgggaacacggtggtgctgggggacaagcaggctcctgttgagctggagcacctctgggcacagaagttttattttcctggcattcccaacaagtgttccctggggattcagctcatggtcactgttgaaagccttcattcagtccccctttctctagccagggctgcctggacccctggatg

SEQ ID NO: 4330 - DNA, 451 bp, Homo sapiens
  misc_feature (398)..(413): n includes a, c, g, or t, or contains no nucleotide
gaaacctctgcaaaggataacataaacatagaggaagctgcccggttcctagtggagaagattcttgtaaaccaccaaagctttcctaatgaagaaaacgatgtggacaaaattaagctagatcaagagaccttgagagcagagaacaaatcccagtgttgctgatatatggcttctgcttctcttgtgtgtgcctcagctctgaagaagttcctgagaatgggttacagatgtcatgttagctgggagtcttcccacatgtggcacttcaaaaggcagcaccactgggcgcctgcacttatttgaaaatggaactttgggagaagtatccctgctagtggctctgtaacttaacagatgacaattaggcttttgtcattgttgccatcatatggaannnnnnnnnnnnnnnnttttaaacatttttatatgacaattcctcaggatttgg

SEQ ID NO: 4331 - DNA, 110 bp, Homo sapiens
gcagagcaggctacgtcctcactgaggtgttcttcatgagagtactagcctcctccactcctccccacagcgcagaggaaacaggccagcccagtgacatgacgttatta

SEQ ID NO: 4332 - DNA, 101 bp, Homo sapiens
gaggctccagtttcccaccatgcggccaccgagagaacgtccccggtcagtctctggtctcgtttgtctagttcctgggagtcactgcagccagagccctc

SEQ ID NO: 4333 - DNA, 273 bp, Homo sapiens
  misc_feature (58)..(79): n includes a, c, g, or t, or contains no nucleotide
  misc_feature (84)..(96): n includes a, c, g, or t, or contains no nucleotide
  misc_feature (98)..(99): n includes a, c, g, or t, or contains no nucleotide
  misc_feature (107)..(107): n includes a, c, g, or t, or contains no nucleotide
  misc_feature (111)..(113): n includes a, c, g, or t, or contains no nucleotide
  misc_feature (155)..(191): n includes a, c, g, or t, or contains no nucleotide
ccagttttgcaggagattcagcacctagtgtcttcctgcctcacgctcccaagaaccnnnnnnnnnnnnnnnnnnnnnngaacnnnnnnnnnnnnncnngatgtcanaatnnngctggtcttcaggcttgaagtccaggttagggctgccatccnnnnnnnnnnnnnnnnnnnnnnnnnnnnnnnnnnnnnggtatttggctttgtacactttggtgaagacctcatccagggcctccagttccttggccgtgagacccgtagtgtcatgggt

SEQ ID NO: 4334 - DNA, 47 bp, Homo sapiens
ggctgcccagactgacgacaacagtggagacttggacccaggagtct

SEQ ID NO: 4335 - DNA, 172 bp, Homo sapiens
ccgcaaggtgcagcacgagctggatgaggcagaggagcgggcggacatcgccgagtcccaggtcaacaagctgcgggccaagagccgtgacattggcacgaagggcttgaatgaggagtagctttgccacatcttgatctgctcagccctggaggtgccagcaaagccccat

SEQ ID NO: 4336 - DNA, 506 bp, Homo sapiens
  misc_feature (155)..(155): n includes a, c, g, or t, or contains no nucleotide
  misc_feature (275)..(309): n includes a, c, g, or t, or contains no nucleotide
gaggtgtcacatggtgcccctagctttatatatggacatggcaggccgatttgggaaccaagctattcctttcccttcctcttcggccctcagatgtcccttgatgcacagagaagctggggaggagctttgttttgggggtcaggcagccagtnagatgagggatgggcctggcattcttgtacagtgtatattgaaatttatttaatgtgagtttggtctggactgacagcatgtgccctcctgagggaggacctggggcacagtccaggaannnnnnnnnnnnnnnnnnnnnnnnnnnnnnnnnnnttgtcaacaaaccaagcatcagggggaagaagcagagagatgcggccaagataggaccttgggccaaatccgctctcttcctgcccctctttctctttcttcctttactttcccttgcttttccctcttttcttactcctcctctttctctccccaacccccattctcatctgcacccttcttttctcatgtgtttg

SEQ ID NO: 4337 - DNA, 564 bp, Homo sapiens
  misc_feature (68)..(108): n includes a, c, g, or t, or contains no nucleotide
  misc_feature (114)..(114): n includes a, c, g, or t, or contains no nucleotide
  misc_feature (116)..(119): n includes a, c, g, or t, or contains no nucleotide
  misc_feature (124)..(124): n includes a, c, g, or t, or contains no nucleotide
  misc_feature (138)..(139): n includes a, c, g, or t, or contains no nucleotide
  misc_feature (142)..(156): n includes a, c, g, or t, or contains no nucleotide
  misc_feature (170)..(170): n includes a, c, g, or t, or contains no nucleotide
  misc_feature (200)..(200): n includes a, c, g, or t, or contains no nucleotide
  misc_feature (218)..(243): n includes a, c, g, or t, or contains no nucleotide
  misc_feature (269)..(269): n includes a, c, g, or t, or contains no nucleotide
  misc_feature (276)..(276): n includes a, c, g, or t, or contains no nucleotide
  misc_feature (303)..(303): n includes a, c, g, or t, or contains no nucleotide
  misc_feature (390)..(474): n includes a, c, g, or t, or contains no nucleotide
cactagcaagctctcaggcctggcatcatggtgcattttactgctgaggagaaggctgccgtcactannnnnnnnnnnnnnnnnnnnnnnnnnnnnnnnnnnnnnnnngccttngnnnnactcntcgttgtttacccnnggnnnnnnnnnnnnnnngacagctttggaancctgtcgtctccctctgccatcctgggcanccccaaggtcaaggcccnnnnnnnnnnnnnnnnnnnnnnnnnntttggagatgctattaaaaacatggnacaaccntcaagcccgcctttgctaagctgagtnagctgcactgtgacaagctgcatgtggatcctgagaacttcaagctcctgggtaacgtgatggtgattattctggctactcactttnnnnnnnnnnnnnnnnnnnnnnnnnnnnnnnnnnnnnnnnnnnnnnnnnnnnnnnnnnnnnnnnnnnnnnnnnnnnnnnnnnnnngagttctcttccagtttgcaggtgttcctgtgaccctgacaccctccttctgcacatggggactgggcttggccttgagagaaagccttc

SEQ ID NO: 4338 - DNA, 550 bp, Homo sapiens
  misc_feature (153)..(228): n includes a, c, g, or t, or contains no nucleotide
  misc_feature (279)..(279): n includes a, c, g, or t, or contains no nucleotide
  misc_feature (380)..(383): n includes a, c, g, or t, or contains no nucleotide
  misc_feature (398)..(399): n includes a, c, g, or t, or contains no nucleotide
  misc_feature (401)..(415): n includes a, c, g, or t, or contains no nucleotide
  misc_feature (418)..(419): n includes a, c, g, or t, or contains no nucleotide
  misc_feature (421)..(421): n includes a, c, g, or t, or contains no nucleotide
  misc_feature (436)..(436): n includes a, c, g, or t, or contains no nucleotide
  misc_feature (453)..(453): n includes a, c, g, or t, or contains no nucleotide
  misc_feature (461)..(461): n includes a, c, g, or t, or contains no nucleotide
  misc_feature (485)..(485): n includes a, c, g, or t, or contains no nucleotide
  misc_feature (489)..(489): n includes a, c, g, or t, or contains no nucleotide
  misc_feature (507)..(507): n includes a, c, g, or t, or contains no nucleotide
  misc_feature (516)..(516): n includes a, c, g, or t, or contains no nucleotide
  misc_feature (525)..(525): n includes a, c, g, or t, or contains no nucleotide
gcttctgccaggaatgtaacaacatgctgtaccccaaggaagacaaggagaaccgcattctgctctacgcgtgccggaactgtgattaccagcaggaggccgacaacagctgcatctatgtcaacaagatcacgcacgaagtggacgaactgnnnnnnnnnnnnnnnnnnnnnnnnnnnnnnnnnnnnnnnnnnnnnnnnnnnnnnnnnnnnnnnnnnnnnnnnnnnngccacaaggaggctgtgttcttccagtcacacagtgcgcgggccgaggacnccatgcgcctttactacgtgtgcacagccccacactgcggccaccgctggaccgagtgacctcctctctcccccgagtgtaataaacaccagattccatgnnnnaaaaaaaaaaaaaannannnnnnnnnnnnnnncgnnanctcatgatatattcnaccggaattccgaccgnacctgagngtacactttctttatggcgataanctgngatatggctactgtctgngaatgttcntcatcccanatcaccgactaaggaaactgggcat

SEQ ID NO: 4339 - DNA, 323 bp, Homo sapiens
ctacagataccacaacctggatcaggtccaagcaaaacgtccagagtgctacaaaatgttgcgttctcagtccaaaaagaagtggaaaagaatctgaagtcatgcttggacaatgttaatgttgtgtccgtagacactgccagaacactattcaaccaagtgatggaaaaggagtttgaagacggcatcattaactggggaagaattgtaaccatatttgcatttgaaggtattctcatcaagaaacttctacgacagcaaattgccccggatgtggatacctataaggagatttcatattttgttgcggagttcataatgaa

SEQ ID NO: 4340 - DNA, 242 bp, Homo sapiens
  misc_feature (41)..(41): n includes a, c, g, or t, or contains no nucleotide
tattttcctgtcagcatctgagcttgaggatggtagtgagnaaatgggccagggcgcagtcagctccagtcccagagagctcctctctaactcagagcaactgaactgagacagaggaggaaaacagagcatcagaagcctgcagtggtggttgtgacgggtaggaggataggaagacagggggccccaacctgggattgctgagcagggaagctttgcatgttgctctaaggtacattttt

SEQ ID NO: 4341 - DNA, 577 bp, Homo sapiens
tgcacagtgaagtgctggcaaccactaagaattcaaactggggcctccagaactcactggggcctacagctttgatccctgacatctggaatctggagaccagggagcctttggttctggccagaatgctgcaggacttgagaagacctcacctagaaattgacacaagtggaccttaggccttcctctctccagatgtttccagacttccttgagacacggagcccagccctccccatggagccagctccctctatttatgtttgcacttgtgattatttattatttatttattatttatttatttacagatgaatgtatttatttgggagaccggggtatcctgggggacccaatgtaggagctgccttggctcagacatgttttccgtgaaaacggagctgaacaataggctgttcccatgtagccccctggcctctgtgccttcttttgattatgttttttaaaatatttatctgattaagttgtctaaacaatgctgatttggtgaccaactgtcactcattgctgagcctctgctccccaggggagttgtgtctgtaatcgccctactatt

SEQ ID NO: 4342 - DNA, 483 bp, Homo sapiens
  misc_feature (170)..(185): n includes a, c, g, or t, or contains no nucleotide
  misc_feature (263)..(263): n includes a, c, g, or t, or contains no nucleotide
  misc_feature (267)..(269): n includes a, c, g, or t, or contains no nucleotide
  misc_feature (289)..(289): n includes a, c, g, or t, or contains no nucleotide
  misc_feature (291)..(301): n includes a, c, g, or t, or contains no nucleotide
  misc_feature (357)..(424): n includes a, c, g, or t, or contains no nucleotide
ggatgttccttcgttgtttccatgagtattgcaggtaataatacagtgtattcataagaatctcaatcttggggctaaatgccttgtttctttgcacctcttttcaagtccttacatttaattactaattgataagcagcagcttcctacatatagtaggaaactgccannnnnnnnnnnnnnnnattggctgggcctgctgctgttcctagtaagatattctgaattccattttatcaataaagcttgatttaacaaacaanaaannnaaaaaaaaaaaaaaaaaaanannnnnnnnnnnaaaacactgtgccgttgtaatgagacgtttctcatagggaaagatgttagtctctnnnnnnnnnnnnnnnnnnnnnnnnnnnnnnnnnnnnnnnnnnnnnnnnnnnnnnnnnnnnnnnnnnnnttaattcttggttgtaccttaatctattttttaaataggtttctttcaggctgcttatt

SEQ ID NO: 4343 - DNA, 435 bp, Homo sapiens
  misc_feature (247)..(283): n includes a, c, g, or t, or contains no nucleotide
ccggagccataactgctgcagtttgggcccaggctatgtgctcttctggtgccctagggactgctgtggccagagcctggggccagccagtacagtcctgagccgaggaggagggactgcaagtggaagagagccagtctggaaggaagagctttccaggtggacagggcttcttggaagacccccaaagccccaggtatcctgggtgaagcctgtttgcctctcttgaaaatggcaggtgctcttnnnnnnnnnnnnnnnnnnnnnnnnnnnnnnnnnnnnnagtaggaagcatggactctcctgagtgagaagagactgaaataggagcaagcagaaccctgagaggtgtcccatcttattgctgttgaggaccctgaaacaccgttgtttaaagacttcacacagaaggctctgaactgagccactggggaa

SEQ ID NO: 4344 - DNA, 434 bp, Homo sapiens
  misc_feature (43)..(43): n includes a, c, g, or t, or contains no nucleotide
  misc_feature (47)..(47): n includes a, c, g, or t, or contains no nucleotide
  misc_feature (50)..(50): n includes a, c, g, or t, or contains no nucleotide
  misc_feature (54)..(54): n includes a, c, g, or t, or contains no nucleotide
  misc_feature (123)..(123): n includes a, c, g, or t, or contains no nucleotide
  misc_feature (150)..(150): n includes a, c, g, or t, or contains no nucleotide
  misc_feature (327)..(327): n includes a, c, g, or t, or contains no nucleotide
  misc_feature (352)..(404): n includes a, c, g, or t, or contains no nucleotide
agcctccatggtctacctgatccgggtggcacggaggaaccanggangcngtgnccctgcgcaccgtctggagctccggagatgacaaggagcagctggtgaagaacacatatgtcctgtganccgccctgtcgccaagaggactggggnaagggaggggagactatgtgtgagctttttttaaatagagggattgactcggatttgagtgatcattagggctgaggtctgtttctctgggaggtaggacggctgcttcctggtctggcagggatgggtttgctttggaaatcctctaggaggctcctcctcgcatggcctgcagtntggcagcagccccgagttgtttccnnnnnnnnnnnnnnnnnnnnnnnnnnnnnnnnnnnnnnnnnnnnnnnnnnnnnccattgcctcttttctcatcacagaagtga

SEQ ID NO: 4345 - DNA, 41 bp, Homo sapiens
gagagaagcgctgagtcctgtgcaacatggaaagtgcagaa

SEQ ID NO: 4346 - DNA, 358 bp, Homo sapiens
  misc_feature (98)..(98): n includes a, c, g, or t, or contains no nucleotide
  misc_feature (239)..(253): n includes a, c, g, or t, or contains no nucleotide
ataccggaaaggtgtgatcaaggccacacccaccacctgtgacccccagcttgtggaccactctgtcctgctggtgggttttggcagcgtcaagtcanaggaggggatatgggcagagacagtctcatcgcagtctcagcctcagcctccacaccccaccccatactggatcctgaagaactcctggggggcccaatggggagagaagggctatttccggctgcaccgagggagcaatnnnnnnnnnnnnnnnaagttcccgctcactgcccgtgtgcagaaaccggatatgaagccccgagtctcctgccctccctgaacccacctggccccctcagctctgtcctgttaggccaac

SEQ ID NO: 4347 - DNA, 414 bp, Homo sapiens
  misc_feature (255)..(297): n includes a, c, g, or t, or contains no nucleotide
  misc_feature (300)..(301): n includes a, c, g, or t, or contains no nucleotide
  misc_feature (310)..(318): n includes a, c, g, or t, or contains no nucleotide
  misc_feature (355)..(376): n includes a, c, g, or t, or contains no nucleotide
tctacactcctaggacgcacgcatatcagcccgtgtaccctgtgacagtgactgtccccacctcctgtgttagtggtgcccttactgccgtcgctcatccactcgtgtgggacgtaggattgcacagggctgtgccagtggcgtgtagggaacactgccctggctcagcgtgcgagctaaggtggcgatgtatgcgatgggactctgcatgggatagtacagttgtgtagacgtcttccaaataaattatgtgtnnnnnnnnnnnnnnnnnnnnnnnnnnnnnnnnnnnnnnnnnnnaannaaaaaaaannnnnnnnnatgcatatatgttattttttgtaattacaggatcatnnnnnnnnnnnnnnnnnnnnnntttttctcaatattgtgaaaaaacttccacatcagtag

SEQ ID NO: 4348 - DNA, 135 bp, Homo sapiens
ccaaaatgcatccaaaataagatggcttaatggctaggcagaggggagagatgtgatgaagtcagtacagcagaatggtaacaagtgagcatctccctaatgggaatgggacattcctggtagagctgggagaaa

SEQ ID NO: 4349 - DNA, 403 bp, Homo sapiens
  misc_feature (275)..(309): n includes a, c, g, or t, or contains no nucleotide
aaaggctcgattttgtatctgcaggcagacacggatctgagaatctttattgagaaagagcacttaagagaatattttaagtattgcatctgtataagtaagaaaatattttgtctaaaatgcctcagtgtatttgtatttttttgcaagtgaaggtttacaatttacaaagtgtgtattaaaaaaaacaaaaagaacaaaaaaatctgcagaaggaaaaatgtgtaattttgttctagttttcagtttgtatatacccgtacaacgtgtcctcnnnnnnnnnnnnnnnnnnnnnnnnnnnnnnnnnnngcgagcgtgcaccatccctttttgaagtgtaggcagacacagggacttgaagttgttactaactaaactctctttgggaatgtttgtctcatcc

SEQ ID NO: 4350 - DNA, 551 bp, Homo sapiens
  misc_feature (41)..(103): n includes a, c, g, or t, or contains no nucleotide
  misc_feature (146)..(146): n includes a, c, g, or t, or contains no nucleotide
  misc_feature (177)..(177): n includes a, c, g, or t, or contains no nucleotide
  misc_feature (189)..(189): n includes a, c, g, or t, or contains no nucleotide
  misc_feature (445)..(446): n includes a, c, g, or t, or contains no nucleotide
actctgctctacgtggtccatgcggtgttctctttaatcannnnnnnnnnnnnnnnnnnnnnnnnnnnnnnnnnnnnnnnnnnnnnnnnnnnnnnnnnnnnnngccgccccactttccggcataactttttagaaaacagaaatgncccttgatggtggaaaaaagaaaacaaccancccccccactgncccaaaaaaaaaagccctgccctgttgctcgtgggtgctgtgtttactctcccgtgtgccttcgcgtccgggttgggagcttgctgtgtctaacctccaactgctgtgctgtctgctagggtcacctcctgtttgtgaaaggggaccttcttgttcgggggtgggaagtggcgaccgtgacctgagaaggaaagaaagatcctctgctgacccctggagcagctctcgagaactacctgttggtattgtccacaanntctcccgagcgccccatcttgtgccatgttttaagtcttcatggatgttctgcatgtcatggggactaaaactcacccaacagatctttccagaggtccatggtg

SEQ ID NO: 4351 - DNA, 458 bp, Homo sapiens
  misc_feature (328)..(328): n includes a, c, g, or t, or contains no nucleotide
ttcagctccttatggggcccggtatgtgggctccatggtggctgatgttcatcgcactctggtctacggagggatatttctgtaccccgctaacaagaagagccccaatggaaagctgagactgctgtacgaatgcaaccccatggcctacgtcatggagaaggctgggggaatggccaccactgggaaggaggccgtgttagacgtcattcccacagacattcaccagagggcgccggtgatcttggggtcccccgacgacgtgctcgagttcctgaaggtgtatgagaagcactctgcccagtgagcacctgccctgcctgcatcnggagaattgcctctacctggaccttttgtctcacacagcagtaccctgacctgctgtgcaccttacattcctagagagcagaaataaaaagcatgactatttccaccatcaaatgctgtagaatgcttgg

SEQ ID NO: 4352 - DNA, 540 bp, Homo sapiens
  misc_feature (29)..(50): n includes a, c, g, or t, or contains no nucleotide
  misc_feature (186)..(192): n includes a, c, g, or t, or contains no nucleotide
  misc_feature (196)..(197): n includes a, c, g, or t, or contains no nucleotide
  misc_feature (199)..(200): n includes a, c, g, or t, or contains no nucleotide
  misc_feature (202)..(202): n includes a, c, g, or t, or contains no nucleotide
  misc_feature (204)..(204): n includes a, c, g, or t, or contains no nucleotide
  misc_feature (225)..(264): n includes a, c, g, or t, or contains no nucleotide
  misc_feature (277)..(278): n includes a, c, g, or t, or contains no nucleotide
  misc_feature (281)..(281): n includes a, c, g, or t, or contains no nucleotide
  misc_feature (299)..(299): n includes a, c, g, or t, or contains no nucleotide
  misc_feature (304)..(304): n includes a, c, g, or t, or contains no nucleotide
  misc_feature (308)..(356): n includes a, c, g, or t, or contains no nucleotide
  misc_feature (358)..(359): n includes a, c, g, or t, or contains no nucleotide
tttgcagtgactgagaaatgctccgactnnnnnnnnnnnnnnnnnnnnnntgatgacatcatgttgctagacaatggccaagaggtctacatgtgggtggggacccagactagccaggtggagatcaagctgagcctgaaggcctgccaggtatatatccagcacatgcggtccaaggaacatgannnnnnncgcnncnncngncgcctggtccgcaagggcaannnnnnnnnnnnnnnnnnnnnnnnnnnnnnnnnnnnnnnngccttctgcaagnnccntggcctaagacaggctgncacancccnnnnnnnnnnnnnnnnnnnnnnnnnnnnnnnnnnnnnnnnnnnnnnnnnanngaatgtactcaggtgacaccacctgctccagccacgtccagtgccacagtccccagtagcctcaagcagcaccaatggggatgaccctgacaggtgccctcaggggtctgggaaatccaactctctccacagtgtgagtgcacgtgtgaagccccctcactcttccgctagggataaagca

SEQ ID NO: 4353 - DNA, 567 bp, Homo sapiens
  misc_feature (183)..(241): n includes a, c, g, or t, or contains no nucleotide
gagggcagtccctcagaatcccagaggcagtcccagcctcagaacccaggataggaaatgggtgtgtttagtggggaaagggacggggtgcagacggcagggccagtatggggccccctccctctcctctcctctcctatggtgagcccagcgtgggcaccgggccgtctcagccgtgttccnnnnnnnnnnnnnnnnnnnnnnnnnnnnnnnnnnnnnnnnnnnnnnnnnnnnnnnnnnnaagccagttgggctgtgttaaaggaagcagtgtttttggtttgattctgcctctgtagctcaaggggggcagcccccagagtcctgtgcattctgccaaggctccatagctttgccaaatgcacggagctctgccattccggtgcagtgcaggccttgcgaagggtttatctgcgttcgtctcggtgggcttctcctgcatgggagttgtgttcctgtgcaagggggagctttgctcaggacaggatgactgtcttccctattcttagggacaagtcccaagatgccagaaaggcagtctcccaaggacccaccatgcagaagtgt

SEQ ID NO: 4354 - DNA, 409 bp, Homo sapiens
cattgacatgatctgccgtgcccaccaactggtgatggaaggttacaagtggcacttcaatgagacggtgctcactgtgtggtcggcacccaactactgctaccgctgtgggaatgtggcagccatcttggagctggacgagcatctccagaaagatttcatcatctttgaggctgctccccaagagacacggggcatcccctccaagaagcccgtggccgactacttcctgtgaccccgcccggcccctgccccctccaacccttctggccctcgcaccactgtgactctgccatcttcctcagacggaggctgggggggctgtcctggctctgctgtcccccaagagggtgccttcgagggtgaggacttctctggagaggcctggagacctagctccatgttcctc

SEQ ID NO: 4355 - DNA, 561 bp, Homo sapiens
  misc_feature (42)..(57): n includes a, c, g, or t, or contains no nucleotide
  misc_feature (101)..(118): n includes a, c, g, or t, or contains no nucleotide
  misc_feature (236)..(236): n includes a, c, g, or t, or contains no nucleotide
  misc_feature (240)..(240): n includes a, c, g, or t, or contains no nucleotide
  misc_feature (453)..(453): n includes a, c, g, or t, or contains no nucleotide
  misc_feature (465)..(465): n includes a, c, g, or t, or contains no nucleotide
  misc_feature (486)..(486): n includes a, c, g, or t, or contains no nucleotide
gttgcctagtaatcaccccatgtaggtgtacattgtgacaannnnnnnnnnnnnnnntaaggggcccccttggtgaccccagcacattcacagcagtgttnnnnnnnnnnnnnnnnnngagatgctggctggcctttcagtgcctcccaggaagacacatggcctttccctcttcagatgcctgaagggagtgctttgaggcaggtgatgtgctgggagtgtgggcggcctccctnctgnccccggggccctctgtggaccttggctccctccgtggacctgggcttcgtggtgagcactgcagcctccctgggcattccctccagcgccagcaccactgcaacatatagacctgagtgctattgtattttggcttggtgtgtatgctcttcattgtgtaaaattgctgttcttttgacaatttaagtgattgttttgtttactgtaagtttnaaaataaaaatnaagaaaaaaattccaatgacngtgctgtggttggagactttatttaccaagatgtttactcttcctttccccttccattttgaggagctgtgtcac

SEQ ID NO: 4356 - DNA, 544 bp, Homo sapiens
  misc_feature (344)..(371): n includes a, c, g, or t, or contains no nucleotide
  misc_feature (486)..(486): n includes a, c, g, or t, or contains no nucleotide
  misc_feature (493)..(493): n includes a, c, g, or t, or contains no nucleotide
  misc_feature (502)..(503): n includes a, c, g, or t, or contains no nucleotide
  misc_feature (507)..(510): n includes a, c, g, or t, or contains no nucleotide
  misc_feature (512)..(516): n includes a, c, g, or t, or contains no nucleotide
agtaaatattcgacaggccataacttgagtctattgccttgcctttattacatgtacattttgaattctgtgaccagtgatttgggttttattttgtatttgcagggtttgtcattaataattaatgcccctctcttacagaacactcctatttgtacctcaacaaatgcaaattttccccgtttgccctacgccccttttggtacacctagaggttgatttcctttttcatcgatggtactatttcttagtgttttaaattggaacatatcttgcctcatgaagctttaaattataattttcagtttctccccatgaagcgctctcgtctgacatttgtttgnnnnnnnnnnnnnnnnnnnnnnnnnnnnatgtaccgtcctttccaatacgattttctgttgcaccttgtagtggattctgcatatcatctttcccacctaaaaatgtctgaatgcttacacaaataaattttataacacgctnaaaaaanaaaaaaaannaaannnnannnnncagaggacagggcacctgctgtgtatgt

SEQ ID NO: 4357 - DNA, 553 bp, Homo sapiens
  misc_feature (269)..(284): n includes a, c, g, or t, or contains no nucleotide
tgactacagagctggaggcatttgcacaccgcccagagcacaagacctctgacagcacgttcctggtgttcatgtctcatggtattcgggaaggcatttgtgggaagaaacactctgagcaagtcccagatatactacaactcaatgcaatctttaacatgttgaataccaagaactgcccaagtttgaaggacaaaccgaaggtgatcatcatccaggcctgccgtggtgacagccctggtgtggtgtggtttaaagattcagtaggnnnnnnnnnnnnnnnntctttaccaactacagaagagtttgaggatgatgctattaagaaagcccacatagagaaggattttatcgctttctgctcttccacaccagataatgtttcttggagacatcccacaatgggctctgtttttattggaagactcattgaacatatgcaagaatatgcctgttcctgtgatgtggaggaaattttccgcaaggttcgattttcatttgagcagccagatggtagagcgcagatgcccaccactgaaagagtgactttgac

SEQ ID NO: 4358 - DNA, 484 bp, Homo sapiens
  misc_feature (30)..(73): n includes a, c, g, or t, or contains no nucleotide
  misc_feature (206)..(284): n includes a, c, g, or t, or contains no nucleotide
  misc_feature (352)..(369): n includes a, c, g, or t, or contains no nucleotide
ggtgatcgcctttctccgccagcatccccnnnnnnnnnnnnnnnnnnnnnnnnnnnnnnnnnnnnnnnnnnnnatggggatgtgctctacttcctgacagagcaccgcgacggattccagcacggagagctgggccaccctctctacttctggttttactttgtcttcatgaatgccctgtggctggtgctgcctggagtccttgnnnnnnnnnnnnnnnnnnnnnnnnnnnnnnnnnnnnnnnnnnnnnnnnnnnnnnnnnnnnnnnnnnnnnnnnnnnnnnnctgaggagtggtggaccaggctcgaacactggccgaggaggagctctctgcctgccagaagagtctannnnnnnnnnnnnnnnnnggagggacaaagctaattgatctgtcacactcaggctcatgggcaggcacaagaaggggaataaaggggctgtgtgaaggcactgctgggagccattagaacacagatacaagag

SEQ ID NO: 4359 - DNA, 503 bp, Homo sapiens
  misc_feature (315)..(347): n includes a, c, g, or t, or contains no nucleotide
  misc_feature (371)..(374): n includes a, c, g, or t, or contains no nucleotide
  misc_feature (377)..(378): n includes a, c, g, or t, or contains no nucleotide
  misc_feature (443)..(443): n includes a, c, g, or t, or contains no nucleotide
  misc_feature (448)..(450): n includes a, c, g, or t, or contains no nucleotide
tttatggtcccacttgtatatgaaaatgtggttagaatgttaattggataatgtatatataagaagttaaagtatgtaaagtataacttcagccacatttttagaacactgtttaacatttttgcaaaaccttcttgtaggaaaagagagctctctacatgaagatgacttgttttatatttcagattttattttaaaagccatgtctgttaaacaagaaaaaacacaaaagaactccagattcctggttcatcattctgtattcttactcactttttcaagttatctattttgttgcataaactaattgttaannnnnnnnnnnnnnnnnnnnnnnnnnnnnnnnnagaactttgaccaaggctataaannnnacnnacattattttcagtattgttggttatatttaaattttccttacaataaagcacacttttataatnaaaannngaattattgtttttcatacttttttgcttgtttcttaaagttttctgacgtgc

SEQ ID NO: 4360 - DNA, 463 bp, Homo sapiens
  misc_feature (149)..(149): n includes a, c, g, or t, or contains no nucleotide
  misc_feature (169)..(169): n includes a, c, g, or t, or contains no nucleotide
  misc_feature (173)..(174): n includes a, c, g, or t, or contains no nucleotide
  misc_feature (176)..(176): n includes a, c, g, or t, or contains no nucleotide
  misc_feature (178)..(213): n includes a, c, g, or t, or contains no nucleotide
  misc_feature (414)..(434): n includes a, c, g, or t, or contains no nucleotide
ggcaggcctgtcttcaaatggccatctcatggcatctgagtcgccgccagccagacatggtgcctctggggcaccacaaagaaaaatatttctcaggccccaagcccaaagctgtgctaaaccaattccgaacagatttggaaaagctngaaaaggagattacagcccngaannancnnnnnnnnnnnnnnnnnnnnnnnnnnnnnnnnnnnngcatagagaacagtgtcaccatctgagccctagagtgactctacctgcaagatttcacatcagctttaggactgacatttctatcttgaatttcatgctttcctaaagtctctgctgctaaggctctatttcctcccccagttaaaccccctacattagtatcccactagcccaggggagcagtaaactttctctgcaaannnnnnnnnnnnnnnnnnnnnttgcagaccgcatagtcactgtctcaact

SEQ ID NO: 4361 - DNA, 446 bp, Homo sapiens
  misc_feature (100)..(116): n includes a, c, g, or t, or contains no nucleotide
  misc_feature (332)..(333): n includes a, c, g, or t, or contains no nucleotide
  misc_feature (345)..(365): n includes a, c, g, or t, or contains no nucleotide
cggggtctcggagatccggcacactgcggaccgctggcgcgtgtccctggatgtcaaccacttcgccccggacgagctgacggtcaagaccaaggatggnnnnnnnnnnnnnnnnngcaagcacgaggagcggcaggacgagcatggctacatctcccggtgcttcacgcggaaatacacgctgccccccggtgtggaccccacccaagtttcctcctccctgtcccctgagggcacactgaccgtggaggcccccatgcccaagctagccacgcagtccaacgagatcaccatcccagtcaccttcgagtcgcgggcccagcttgggggcnnagaagctgcaannnnnnnnnnnnnnnnnnnnnagtaaagccttagcccggatgcccacccctgctgccgccactggctgtgcctcccccgccacctgtgtgttcttttgatac

SEQ ID NO: 4362 - DNA, 506 bp, Homo sapiens
aaagctttggcagaatcttggaatgcagcttttttggaatcttctgctaaagaaaatcagactgctgtggatgtttttcgaaggataattttggaggcagaaaaaatggacggggcagcttcacaaggcaagtcttcatgctcggtgatgtgattctgctgcaaagcctgaggacactgggaatatattctacctgaagaagcaaactgcccgttctccttgaagataaactatgcttcttttttcttctgttaacctgaaagatatcatttgggtcagagctcccctcccttcagattatgttaactctgagtctgtccaaatgagttcacttccattttcaaattttaagcaatcatattttcaatttatatattgtatttcttaatattatgaccaagaattttatcggcattaatttttcagtgtagtttgttgtttaaaataatgtaatcatcaaaatgatgcatattgttacactactattaactaggcttcagtatatc

SEQ ID NO: 4363 - DNA, 492 bp, Homo sapiens
agctttcttgctagccccctagtcggtcaccaaactagtaactagtggggcttaatgaaggtcataagtttctgagatgggagagcaacaagtagagatgaagttaaaggtatttatcattcaagaaatcattattgagtcaccattgacaggcactattctaatcagtagttcactttaatatttaataagattttctgggataacagtaagggatattagataatataccgtatgtatttattactagtcttttcctctaggaaaagggatactttgataattaaggccagaggcccattagttgagaaagtcacagatatatttctccaagaaagccaacaaccaccaccacaatgacagaaatgacaacaaggccctttaacttgtcttctagtttagagacatccttcatttgacatttagtagaattcctctttggccacaagaataagcagcaaataaacaactatggctgttgaggttctcatt

SEQ ID NO: 4364 - DNA, 499 bp, Homo sapiens
  misc_feature (108)..(123): n includes a, c, g, or t, or contains no nucleotide
  misc_feature (327)..(388): n includes a, c, g, or t, or contains no nucleotide
atgcagccctgcagggagaccctgccctccaagatgctggtgatagcagcagaaaggagtactttatttgagggacaacagacttcacttccctgaatgcctcccccnnnnnnnnnnnnnnnnaatacaccccatcgcccagcacccctgctgataccaccagacagagagagagagcacttgattcttcccgagatagccacctggaaacactaggtgcctgcccagggaggaacggaggaggactcgcgctacaagaggccactcccagggacccagggaggcgatggccaccccagaggccaccttttgctccacggaggtggnnnnnnnnnnnnnnnnnnnnnnnnnnnnnnnnnnnnnnnnnnnnnnnnnnnnnnnnnnnnnngaaagtccttgttgagggtgagggggtgctggggtacccgggggctggggaagcaaggaaataagtcatctgtatgctgactggggataatggcatcaaatgtcagtcctt

SEQ ID NO: 4365 - DNA, 535 bp, Homo sapiens
  misc_feature (39)..(39): n includes a, c, g, or t, or contains no nucleotide
  misc_feature (43)..(44): n includes a, c, g, or t, or contains no nucleotide
  misc_feature (53)..(53): n includes a, c, g, or t, or contains no nucleotide
  misc_feature (62)..(62): n includes a, c, g, or t, or contains no nucleotide
  misc_feature (70)..(70): n includes a, c, g, or t, or contains no nucleotide
  misc_feature (74)..(74): n includes a, c, g, or t, or contains no nucleotide
  misc_feature (86)..(86): n includes a, c, g, or t, or contains no nucleotide
  misc_feature (113)..(113): n includes a, c, g, or t, or contains no nucleotide
  misc_feature (124)..(124): n includes a, c, g, or t, or contains no nucleotide
  misc_feature (127)..(127): n includes a, c, g, or t, or contains no nucleotide
  misc_feature (142)..(142): n includes a, c, g, or t, or contains no nucleotide
  misc_feature (148)..(148): n includes a, c, g, or t, or contains no nucleotide
  misc_feature (171)..(465): n includes a, c, g, or t, or contains no nucleotide
ttgcacggatctaagttattctccccagccagagcccgngctnnctgctcccngggaaaagntggcgtantggncctgagctgggntttatattttatatctgcaaataaatnacattttatcntanatttagggaaagccngagagnaacaacaaaaaatgtttaagccnnnnnnnnnnnnnnnnnnnnnnnnnnnnnnnnnnnnnnnnnnnnnnnnnnnnnnnnnnnnnnnnnnnnnnnnnnnnnnnnnnnnnnnnnnnnnnnnnnnnnnnnnnnnnnnnnnnnnnnnnnnnnnnnnnnnnnnnnnnnnnnnnnnnnnnnnnnnnnnnnnnnnnnnnnnnnnnnnnnnnnnnnnnnnnnnnnnnnnnnnnnnnnnnnnnnnnnnnnnnnnnnnnnnnnnnnnnnnnnnnnnnnnnnnnnnnnnnnnnnnnnnnnnnnnnnnnnnnnnnnnnnnnnnnnnnnnntattgcccggctcctagaatttatttatttcctgacttacagcaagcgagttatcgtcttctgtattttg

SEQ ID NO: 4366 - DNA, 554 bp, Homo sapiens
aatcgacgagctcatctgcgcctttgtttagaacgcttaaaagttctgattccactaggaccagactgcacccggcacacaacacttggtttgctcaacaaagccaaagcacacatcaagaaacttgaagaagctgaaagaaaaagccagcaccagctcgagaatttggaacgagaacagagatttttaaagtggcgactggaacagctgcagggtcctcaggagatggaacgaatacgaatggacagcattggatcaactatttcttcagatcgttctgattcagagcgagaggagattgaagtggatgttgaaagcacagagttctcccatggagaagtggacaatataagtaccaccagcatcagtgacattgatgaccacagcagcctgccgagtattgggagtgacgagggttactccagtgccagtgtcaaactttcattcacttcatagaacccagcatgacataacagtgcagggcaaaatattcactgggccaattcaatacaaacaatctcttaaattgggttcatgatgcagtctcctcttta

SEQ ID NO: 4367 - DNA, 211 bp, Homo sapiens
  misc_feature (26)..(26): n includes a, c, g, or t, or contains no nucleotide
ctggagtcactccccgagcagcgcgncggcggcagggagttgggttggggtgggcatttgatgcgggaggtgggtggtgtgcttgctagctgggcaagaaagcagcagtggacctgccccaaggccacacgtgcctggtcaggctggcttctgatgttcagtcccctgggccgggacagattttttttaacgtcttgaaacttaaactctg

SEQ ID NO: 4368 - DNA, 521 bp, Homo sapiens
  misc_feature (85)..(104): n includes a, c, g, or t, or contains no nucleotide
  misc_feature (220)..(252): n includes a, c, g, or t, or contains no nucleotide
  misc_feature (272)..(274): n includes a, c, g, or t, or contains no nucleotide
  misc_feature (294)..(313): n includes a, c, g, or t, or contains no nucleotide
  misc_feature (315)..(316): n includes a, c, g, or t, or contains no nucleotide
  misc_feature (446)..(446): n includes a, c, g, or t, or contains no nucleotide
  misc_feature (472)..(492): n includes a, c, g, or t, or contains no nucleotide
tggatcagactccaagggctgccctgagtctgggacttctgcctccatggctggtcatgagagcaaaccgtagtcccctggagannnnnnnnnnnnnnnnnnnnttgggagacagaagaggcatctgtgcacagctcgatcttctacttgcctgtggggaggggagtgacaggtccacacaccacactgggtcaccctgtcctggatgcctctgaagagnnnnnnnnnnnnnnnnnnnnnnnnnnnnnnnnnttaaaggtcatttaaaccannnaaaaaaaaaaaaaaaaaaannnnnnnnnnnnnnnnnnnnannttttaacggcgcagctatccttagtagggtaattgctgcatgcgcgtttaaagcgtatggaacatggtacactatgctgagaatcgttgcatggtatcaagcgcagtcctcctaatcatgatgatgaccntggcataaggggtgtgcttcgcgaannnnnnnnnnnnnnnnnnnnncaagcggggtgttccacaaatggtctact

SEQ ID NO: 4369 - DNA, 331 bp, Homo sapiens
catgatcatccctgtacgctgcttcacttgtggcaagatcgtcggcaacaagtgggaggcttacctggggctgctgcaggccgagtacaccgagggggacgcgctggatgccctgggcctgaagcgctactgctgccgccggatgctgctggcccacgtggacctgatcgagaagctgctcaattatgcacccctggagaagtgaccacgctgaaacccacccacccgctgtgctgaccatgggccctgagcgtcctaccccgaattcacgaggctgaggcatccgggagctggcgtaatgcctggccgcagtgtgtgtgtatcccatacc

SEQ ID NO: 4370 - DNA, 501 bp, Homo sapiens
  misc_feature (259)..(281): n includes a, c, g, or t, or contains no nucleotide
agcagctgtggtcattaaaccattagtttacccctctagaactggggtctgcaaactcccacctgcagccaaatctggcccacctcctttttaatgtaagggctgtgagagtggtttttactttttttaatgattaaaaaaatcaaaataatattctgtgacaatgacaggtgaaatttatatgtgacaagtgaaaattatatgaaatttaagagtccataaataaaatttgttggaacacaaaaaaaaaaaaaaaaannnnnnnnnnnnnnnnnnnnnnncgctacactggcagttgaaacagttgcagagttgagtctttgccgcctgcaaatcccaaaacatttacaacctggccctttgcagaaaacatttgctggcccctgagctagaaaatagggagcatagtctccagggaaatagagggcaagccgatggagccggtttattgggtggaagggacgaaggagaggaacccaaagcccgggtacttgtctcaga

SEQ ID NO: 4371 - DNA, 417 bp, Homo sapiens
  misc_feature (227)..(244): n includes a, c, g, or t, or contains no nucleotide
ggcatctgctctctcactgcatacattgtggaaggtgtagggagtgaagtctcacataggaggacctgtgtgagcctcactacccagcgactgccagttagcagaatcaagacctacaccatcacggaaggctccttgagagcagtaatttttattaccaaacgtggcctaaaagtctgtgctgatccacaagccacgtgggtgagagacgtggtcaggagcatggnnnnnnnnnnnnnnnnnngaaataacatgatccagaccaagccaacaggaacccagcaatcgaccaatacagctgtgaccctgactggctagtagtctctggcaccctgtccgtctccagccagccagctcatttcactttacaccctcatggactgagattatactcaccttttatgaaagcactgcatg

SEQ ID NO: 4372 - DNA, 442 bp, Homo sapiens
  misc_feature (241)..(241): n includes a, c, g, or t, or contains no nucleotide
  misc_feature (248)..(248): n includes a, c, g, or t, or contains no nucleotide
  misc_feature (258)..(258): n includes a, c, g, or t, or contains no nucleotide
  misc_feature (262)..(263): n includes a, c, g, or t, or contains no nucleotide
  misc_feature (272)..(273): n includes a, c, g, or t, or contains no nucleotide
  misc_feature (283)..(283): n includes a, c, g, or t, or contains no nucleotide
  misc_feature (292)..(293): n includes a, c, g, or t, or contains no nucleotide
  misc_feature (300)..(300): n includes a, c, g, or t, or contains no nucleotide
  misc_feature (313)..(313): n includes a, c, g, or t, or contains no nucleotide
tctattggcccctgtagaaagttaacctttgttgttttccttttataatttgcttattgcacaattgctttagggtaagtgaattatattaagatgccttgaaattatagcactccttgattaagaagctaaaatgtttctctcatttactccttaaacaaaagacttaaattagtttgggtcattattacttttattttgcagcatttggtttgttattagcgtaagagcaagtataggnatatggnagaggccccntggnncttcatganngaacaaaggncaggcccannggttatnaattacagctttntcctgccccttctttactttctctaccacagttttctccactgtttgttttcctcttgccacaatttgctaacatttaaaaaattttcctgcacccagtagtttcatatcctgtagacatcctcttagg

SEQ ID NO: 4373 - DNA, 383 bp, Homo sapiens
  misc_feature (56)..(56): n includes a, c, g, or t, or contains no nucleotide
  misc_feature (102)..(102): n includes a, c, g, or t, or contains no nucleotide
  misc_feature (115)..(115): n includes a, c, g, or t, or contains no nucleotide
  misc_feature (156)..(156): n includes a, c, g, or t, or contains no nucleotide
  misc_feature (216)..(216): n includes a, c, g, or t, or contains no nucleotide
agtgtgttagtctctccagagggaggctggttccccagggaagcagagcctgtgtncgggcagcagctgtgtgcgggcctgggggttgcatgtgtcacctgnagctgggcactanccattccaagccgccgcatcgcttgtttccacctcctgggnccggggctctggcccccaacgtgtctaggagagctttctccctagatcgcactgtgggcnggggccctggagggctgctctgtgttaataagattgtaaggtttgccctcctcacctgttgccggcatgcgggtagtattagccacccccctccatctgttcccagcaccggagaagggggtgctcaggtggaggtgtggggtatgcacctgagctcctgcttcgcg

SEQ ID NO: 4374 - DNA, 355 bp, Homo sapiens
  misc_feature (31)..(31): n includes a, c, g, or t, or contains no nucleotide
  misc_feature (33)..(33): n includes a, c, g, or t, or contains no nucleotide
  misc_feature (35)..(35): n includes a, c, g, or t, or contains no nucleotide
  misc_feature (50)..(69): n includes a, c, g, or t, or contains no nucleotide
  misc_feature (85)..(85): n includes a, c, g, or t, or contains no nucleotide
  misc_feature (92)..(92): n includes a, c, g, or t, or contains no nucleotide
  misc_feature (94)..(108): n includes a, c, g, or t, or contains no nucleotide
  misc_feature (110)..(127): n includes a, c, g, or t, or contains no nucleotide
  misc_feature (267)..(297): n includes a, c, g, or t, or contains no nucleotide
  misc_feature (310)..(310): n includes a, c, g, or t, or contains no nucleotide
  misc_feature (321)..(322): n includes a, c, g, or t, or contains no nucleotide
cgtcatcatgtttggcgtcccctacgtctanananagagccgcattctcnnnnnnnnnnnnnnnnnnnngcgggaccagttccanattcgtnannnnnnnnnnnnnnncnnnnnnnnnnnnnnnnnngcggcccagtgtgtgggtcgggccatcaggggcaagacggactacggcctcatggtctttgccgacaagcggtttgcccgtggggacaagcgggggaagctgccccgctggatccaggagcacctcacagatgccaaccnnnnnnnnnnnnnnnnnnnnnnnnnnnnnnnggccaagtacttnctgcggcaganngcacagcccttccaccgggaggatcagctgggc

SEQ ID NO: 4375 - DNA, 499 bp, Homo sapiens
  misc_feature (60)..(60): n includes a, c, g, or t, or contains no nucleotide
  misc_feature (69)..(69): n includes a, c, g, or t, or contains no nucleotide
  misc_feature (94)..(94): n includes a, c, g, or t, or contains no nucleotide
  misc_feature (185)..(185): n includes a, c, g, or t, or contains no nucleotide
  misc_feature (199)..(199): n includes a, c, g, or t, or contains no nucleotide
  misc_feature (202)..(203): n includes a, c, g, or t, or contains no nucleotide
  misc_feature (322)..(337): n includes a, c, g, or t, or contains no nucleotide
  misc_feature (366)..(366): n includes a, c, g, or t, or contains no nucleotide
  misc_feature (404)..(404): n includes a, c, g, or t, or contains no nucleotide
ttccacaaggccaccttggacgtggatgaggctggcaccgaggctgcagcagccaccagnttcgcgatncaaattcttctctgcccagaccaantcgccacatcctgcgattcaaccggcccttccttgtggtgatcttttccaccagcacccagagtgtcctctttctgggcaaggtcgtcganccccacgaaaccantanncctcccagggctgctcatctgttccaagcaggaggatgtggcaggggagggctgggagtgagtagctctgtgtttagagttggggacaaggatgacaccgaaggtccaggagtccaggnnnnnnnnnnnnnnnnggtggggagcggggaggggcactgagatnggcagggcctggacattccacaccctggtgctgtgcancctctggcagagcatccgacctcttggagcaagtttctgcctctggaaagggggcgggcccttttcacaacaggctggttgtaccgagtaaacaa

SEQ ID NO: 4376 - DNA, 397 bp, Homo sapiens
  misc_feature (155)..(155): n includes a, c, g, or t, or contains no nucleotide
  misc_feature (168)..(168): n includes a, c, g, or t, or contains no nucleotide
  misc_feature (193)..(193): n includes a, c, g, or t, or contains no nucleotide
  misc_feature (306)..(306): n includes a, c, g, or t, or contains no nucleotide
cgagccctgtgctcgggaagtcccgcagaacgccggcagctgctgcctcgcgcccgggagcaggaggagctgctggcgcccgcagatggcaccgtggagctggtccgggcgctgccgctggcgctggtgctgcacgagctcggggccgggcgcanccgcgctgggganccgctccgcctgggggtgggcgcanagctgctggtcgacgtgggtcagaggctgcgccgtgggaccccctggctccgcgtgcaccgggacggccccgcgctcagcggcccgcagagccgcgccctgcaggaggcgctngtactctccgaccgcgcgccattcgccgccccctcgcccttcgcagagctcgttctgccgccgcagcaataaagctcctttgccgcgaaaa

SEQ ID NO: 4377 - DNA, 470 bp, Homo sapiens
  misc_feature (227)..(227): n includes a, c, g, or t, or contains no nucleotide
  misc_feature (232)..(277): n includes a, c, g, or t, or contains no nucleotide
  misc_feature (284)..(284): n includes a, c, g, or t, or contains no nucleotide
  misc_feature (287)..(331): n includes a, c, g, or t, or contains no nucleotide
  misc_feature (341)..(355): n includes a, c, g, or t, or contains no nucleotide
  misc_feature (386)..(434): n includes a, c, g, or t, or contains no nucleotide
ccagcgcaacgtcaaactcatgagacagatgctaatggatgccggcctccctgttgtccactgccccagccacatcatccctgtgcgggttgcagatgctgctaaaaacacagaagtctgtgatgaactaatgagcagacataacatctacgtgcaagcaatcaattaccctacggtgccccggggagaagagctcctacggattgcccccacccctcaccacacanccccnnnnnnnnnnnnnnnnnnnnnnnnnnnnnnnnnnnnnnnnnnnnnngcaagtnggnnnnnnnnnnnnnnnnnnnnnnnnnnnnnnnnnnnnnnnnnnnnnaggaggccannnnnnnnnnnnnnnatgagtgaaagagagaagtcctatttctcannnnnnnnnnnnnnnnnnnnnnnnnnnnnnnnnnnnnnnnnnnnnnnnntttcacttaaccccaggccattatcatatccagatg

SEQ ID NO: 4378 - DNA, 337 bp, Homo sapiens
  misc_feature (266)..(271): n includes a, c, g, or t, or contains no nucleotide
  misc_feature (273)..(275): n includes a, c, g, or t, or contains no nucleotide
caagggagcctcatgcagatagtaggaaatcaggtctggaaatttaaaaataaaaggcatgagactaaggctatctgcttcccttatgccctgactggagaggggagggaggagaggcaaggcccacagagggcatcccagctaggccttgggatggctgcagtgaggagaaatcccgggaactgtattgacacaaagattcttattgcacttgtattttttgtattaaagtttgcatggtttctaataaaggattcaaacataannnnnnannnaaatggcctgggagattccaagggcttctctggagggggattggctgcagtgtagatttgcc

SEQ ID NO: 4379 - DNA, 258 bp, Homo sapiens
agatcttaggcaaaataccagctgatgaaggcatctgatgccttcatctgttcagtcatctccaaaaacagtaaaaataaccactttttgttgggcaatatgaaatttttaaaggagtagaataccaaatgatagaaacagactgcctgaattgagaattttgattttttaaagtgtgtttctttctaaattgctgttccttaatttgattaatttaattcatgtattatgattaaatctgaggcagatgagcttaca

SEQ ID NO: 4380 - DNA, 461 bp, Homo sapiens
  misc_feature (26)..(26): n includes a, c, g, or t, or contains no nucleotide
  misc_feature (110)..(110): n includes a, c, g, or t, or contains no nucleotide
  misc_feature (228)..(228): n includes a, c, g, or t, or contains no nucleotide
  misc_feature (271)..(290): n includes a, c, g, or t, or contains no nucleotide
  misc_feature (306)..(306): n includes a, c, g, or t, or contains no nucleotide
cactcccagaggtgagacaagccatnccacgtggggaatcagacttttaatgatggaactatagttgaaaagtacttgcgagaagatacagtacagtcagttaagccatnggttaactgaaatcatgaataattataaggttctgatctacaatggccaactggacatcatcgtggcagctgccctgacagagcgctccttgatgggcatggactggaaaggatcccnggaatacaagaaggcagaaaaaaaagtttggaagatctttaannnnnnnnnnnnnnnnnnnngttacatccggcaagngggtgacttccatcaggtaattattcgaggtggaggacatattttaccctatgaccagcctctgagagcttttgacatgattaatcgattcatttatggaaaaggatgggatccttatgttggataaactaccttcccaaaagagaacatcagag

SEQ ID NO: 4381 - DNA, 322 bp, Homo sapiens
  misc_feature (56)..(142): n includes a, c, g, or t, or contains no nucleotide
ctaaaaaaggctccaagaaggccattaacaaggctcagaagaaggatggaaagaannnnnnnnnnnnnnnnnnnnnnnnnnnnnnnnnnnnnnnnnnnnnnnnnnnnnnnnnnnnnnnnnnnnnnnnnnnnnnnnnnnnnnnggctatgggaatcatgaactccttcgtcaacgacatctttgagcgtatcgccggagaagcgtcacgcctggcgcattacaacaagcgctcgaccatcacttcgagggagatccagacggccgtgcgcctactgctacccggggaattggccaagcacgccgtgtccgagggcaccaaggc

SEQ ID NO: 4382 - DNA, 515 bp, Homo sapiens
  misc_feature (357)..(384): n includes a, c, g, or t, or contains no nucleotide
cctttgacttgagtctgctggtaaagcttctgaatattgagtttgctgagaaataaaaatcaaaacttctttaagctggtaaagtgaggggcccaccagcagtgatctcctgatgccttactggaaactttgtttacttgtctgctaccctctgatttgtttttagttagtttttattgtgagcacacatagtacctagttacatcttaagatcaggtttataaaactgtggagtggagcggtatggtatggaatgacttggaatgtaagctgtcagggagaaaatgttgttacacttttgctaagatctgggggtttcttcatattcctgctgttggaagcagttgaccagaaatnnnnnnnnnnnnnnnnnnnnnnnnnnnntgaaatgtgaagtactttgtttttttatttttaatgattttctttttgttattaatatttttctctgttcctttgttattacttgcatggtttggcgtcagaagtccttacctctttatattgtttgcagg

SEQ ID NO: 4383 - DNA, 421 bp, Homo sapiens
  misc_feature (29)..(51): n includes a, c, g, or t, or contains no nucleotide
  misc_feature (232)..(232): n includes a, c, g, or t, or contains no nucleotide
  misc_feature (365)..(379): n includes a, c, g, or t, or contains no nucleotide
agacctgctgaaagggtcgctcctcttcnnnnnnnnnnnnnnnnnnnnnnngcggtttggcttccctgcattcagcggcatctctcgcctgacctggctggtctccctctttggggagctttctcttgtgtctgccactttggaagagcgaaaggaagatcagtatatgaaaatgacagtgtgtctggagacagagaagaaaagtccactgtcatggattgaagaaaaaggncctggtctaaaacgaaacagatatttaagcttccatttcaagtctgggtccttggagaatgtgccaaatgtaggagtgaataagaacatatttctgaaagatcaaaatatatttgtccagaaactcttgggcnnnnnnnnnnnnnnngaactggctgctgaaaagaaacgcatcctgcactgcctgggg

SEQ ID NO: 4384 - DNA, 528 bp, Homo sapiens
agtccacaggaagaggttgaactaaagaagttgaaacatttggagaagtctgtggagaagatagctgaccagctggaagagttgaataaagagcttactggaatccagcagggttttctgcccaaggatttgcaagctgaagctctctgcaaacttgataggagagtaaaagccacaatagagcagtttatgaagatcttggaggagattgacacactgatcctgccagaaaatttcaaagacagtagattgaaaaggaaaggcttggtaaaaaaggttcaggcattcctagccgagtgtgacacagtggagcagaacatctgccaggagactgagcggctgcagtctacaaactttgccctggccgagtgaggtgtagcagaaaaaggctgtgctgccctgaagaatggcgccaccagctctgccgtctctggagcggaatttacctgatttcttcagggctgctgggggcaactggccatttgccaattttcctactctcacactggttctcaatgaaaaatagtg

SEQ ID NO: 4385 - DNA, 495 bp, Homo sapiens
  misc_feature (44)..(44): n includes a, c, g, or t, or contains no nucleotide
  misc_feature (78)..(78): n includes a, c, g, or t, or contains no nucleotide
  misc_feature (99)..(225): n includes a, c, g, or t, or contains no nucleotide
  misc_feature (276)..(316): n includes a, c, g, or t, or contains no nucleotide
gacatttcgaactcgaaaagcatagtgccccaagtatggtacantcttctcttactcctttctcagtgcaagtgactnacattcaagattggtctctcnnnnnnnnnnnnnnnnnnnnnnnnnnnnnnnnnnnnnnnnnnnnnnnnnnnnnnnnnnnnnnnnnnnnnnnnnnnnnnnnnnnnnnnnnnnnnnnnnnnnnnnnnnnnnnnnnnnnnnnnnnnnnnnggatagcaaacttatctgcagaggttgtctcactcaagagacttatagccnnnnnnnnnnnnnnnnnnnnnnnnnnnnnnnnnnnnnnnnntgagtaagagctgggcatttagaaagatgtcatttgcaatagagcagtccattttgtattatgctgaattttcactggacctgtgatgtcatttcactgtgatgtgcacatgttgtctgtttggtgtctttttgtgcacagattatgatgaagattagattgtgttatcactctgcctg

SEQ ID NO: 4386 - DNA, 539 bp, Homo sapiens
  misc_feature (265)..(338): n includes a, c, g, or t, or contains no nucleotide
tcgccagcagctgagggcacgcgctgcactccgtaactcaacatggcatgcctttctctccgtaaactatttagtgagatttttagggactatttttcagtatctctgtacctgttaaagggggtgcttttcgatctaaaaacttaattttataaaattgacttatttttctagactaaaattgtatatgcttttggtaattaggaactcttgagaatattggctgctgattgttgccatcacgttcctacaaaattgtttttcnnnnnnnnnnnnnnnnnnnnnnnnnnnnnnnnnnnnnnnnnnnnnnnnnnnnnnnnnnnnnnnnnnnnnnnnnnagcaaatgcattaaatcccttgccagttaccattaactgtaactatttagcttttgtttagggatctttctgatggtcttttatgagcaatcttagttctaagtcattgttcccatcccttttttgtgtgtttcagaaaatagtgaacttgattcccctgcttccactaaatccagttgtgacaaaatctaacgtgacatc

SEQ ID NO: 4387 - DNA, 307 bp, Homo sapiens
  misc_feature (48)..(89): n includes a, c, g, or t, or contains no nucleotide
  misc_feature (103)..(103): n includes a, c, g, or t, or contains no nucleotide
  misc_feature (105)..(105): n includes a, c, g, or t, or contains no nucleotide
  misc_feature (110)..(110): n includes a, c, g, or t, or contains no nucleotide
  misc_feature (140)..(198): n includes a, c, g, or t, or contains no nucleotide
  misc_feature (249)..(282): n includes a, c, g, or t, or contains no nucleotide
ctttccgcctctttgagaccaagatcacccaagtcctgcacttcaccnnnnnnnnnnnnnnnnnnnnnnnnnnnnnnnnnnnnnnnnnngttcgagcctcctngncgccnttcgcttggaacctgggaaagaatatttgnnnnnnnnnnnnnnnnnnnnnnnnnnnnnnnnnnnnnnnnnnnnnnnnnnnnnnnnnnnctcgaatagctggatcgaggagatgccctctgaacgcctgtgccggagcannnnnnnnnnnnnnnnnnnnnnnnnnnnnnnnnncttcctccaggagtatggcactcag

SEQ ID NO: 4388 - DNA, 592 bp, Homo sapiens
  misc_feature (28)..(28): n includes a, c, g, or t, or contains no nucleotide
  misc_feature (57)..(57): n includes a, c, g, or t, or contains no nucleotide
  misc_feature (93)..(93): n includes a, c, g, or t, or contains no nucleotide
  misc_feature (109)..(109): n includes a, c, g, or t, or contains no nucleotide
  misc_feature (149)..(149): n includes a, c, g, or t, or contains no nucleotide
  misc_feature (158)..(158): n includes a, c, g, or t, or contains no nucleotide
  misc_feature (166)..(166): n includes a, c, g, or t, or contains no nucleotide
  misc_feature (173)..(173): n includes a, c, g, or t, or contains no nucleotide
  misc_feature (175)..(175): n includes a, c, g, or t, or contains no nucleotide
  misc_feature (182)..(182): n includes a, c, g, or t, or contains no nucleotide
  misc_feature (207)..(219): n includes a, c, g, or t, or contains no nucleotide
  misc_feature (222)..(258): n includes a, c, g, or t, or contains no nucleotide
  misc_feature (263)..(263): n includes a, c, g, or t, or contains no nucleotide
  misc_feature (286)..(286): n includes a, c, g, or t, or contains no nucleotide
  misc_feature (321)..(321): n includes a, c, g, or t, or contains no nucleotide
  misc_feature (335)..(335): n includes a, c, g, or t, or contains no nucleotide
  misc_feature (367)..(367): n includes a, c, g, or t, or contains no nucleotide
  misc_feature (521)..(521): n includes a, c, g, or t, or contains no nucleotide
  misc_feature (527)..(541): n includes a, c, g, or t, or contains no nucleotide
aatggcacgttaaccgtcacgtccaccntgccggtgggcacccgagactggatcganggggagacctaccagtgcagggtgacccacccccanctgcccagggccctcntgcggtccacgaccaagaccagcggcccgcgtgctgcccnggaagtctntgcgtttncgacgcngnagtggcnggggagccgggacaagcgcaccctnnnnnnnnnnnnncannnnnnnnnnnnnnnnnnnnnnnnnnnnnnnnnnnnncacancgaggtgcagctcccggacgccnggcacagcacgacgcagccccgcaagaccaagggnctccggcttcttcntcttcagccgcctggaggtgaccagggccgantgggagcagaaagatgagttcatctgccgtgcagtccatgaggcagcgagcccctcacagaccgtccagcgagcggtgtctgtaaatcccggtaaatgacgtactcctgcctccctccctcccagggctccatccagctgtgcagtggggaggnctggcnnnnnnnnnnnnnnnctgttgcaatgaccccaggaagctacccccaataaactgtgcctgctcaga

SEQ ID NO: 4389 - DNA, 501 bp, Homo sapiens
  misc_feature (125)..(156): n includes a, c, g, or t, or contains no nucleotide
  misc_feature (317)..(388): n includes a, c, g, or t, or contains no nucleotide
  misc_feature (446)..(464): n includes a, c, g, or t, or contains no nucleotide
acatgctccggtgcatacaacctctcctccgagtggtcggcccccagcgaccccctggacatcctgatcacaggacagatccgtgccagacccttcctctccgtgcggccgggccccacagtggnnnnnnnnnnnnnnnnnnnnnnnnnnnnnnnntcacagggagggatgcacactttccttttgaccaaggagggggcagctgattccccgctgcgtctaaaatcaaagcgccaatctcataagtaccaggctgaattccccatgagtcctgtgacctcggcccacgcggggacctacaggtgctacggctcacnnnnnnnnnnnnnnnnnnnnnnnnnnnnnnnnnnnnnnnnnnnnnnnnnnnnnnnnnnnnnnnnnnnnnnnnccctcagcccaccacaaaacaagtccgactccaaggctggtgagtgaggagatgcttnnnnnnnnnnnnnnnnnnncagagggtcaggtcctgtcaagaggagctgggtgtcc

SEQ ID NO: 4390 - DNA, 187 bp, Homo sapiens
gcttacgggctcgacttttacatcctcaagaccccgaaggaggacctgtgctccaagtttgggatggagctgaagcgagggatgctgctgcggcttgcccggcaggacccccagctgcaccccgaggaccccgagcggcgggcagccatctacgacaagtacaaggaatttgccatcccagaggagg

SEQ ID NO: 4391 - DNA, 188 bp, Homo sapiens
tccaggccaagagtctcagctggccgagagtccaggccttgcctcccccgaccgccatggagggggcagcccggcacagctgctgggagcccttgtgtgtctggtcacactttttaggcgtcacgccaaaggccagcctcctggccccaatacccattttggaagcccctgtggccgtgtggatgtcg

SEQ ID NO: 4392 - DNA, 223 bp, Homo sapiens
tgatgccacccaggacctcggaccttggagcctgcggggtgcctcggcccctccagccccgggccggacctcctgctggctctcgcccaccaaccaagtgttacaagccccagaatgctgcccggcctgccctgctgggcggactgtctgtgtgtctgtctctctggcgttccacctccaagcctataccagctgtgtacagcgccatctctctgccttctgt

SEQ ID NO: 4393 - DNA, 500 bp, Homo sapiens
  misc_feature (153)..(167): n includes a, c, g, or t, or contains no nucleotide
  misc_feature (457)..(475): n includes a, c, g, or t, or contains no nucleotide
atcattttagctggtgtcagcccctcttcccttcctccattgcacatgaacatatgtccatccatatatattcatcagaatgttaatttattttgctccctctgttaggtccattttctaagggtagaagaggcaagtggtagggatgaggtnnnnnnnnnnnnnnnggtggagagggagactcctgggcagccgttttcctcatcctttccctctcccagtccatttccaaatgtggcctccatgtgggtgctagggacatgggaaaaaccactgctatgccatttcttctctctgttcccttcctcacccccgacggtgtggctgatgatgtcttctggtgtcatggtgaccaccccctgttccctgttctggtatttcccctgtcagtttcccctctcggccaggttgtgtcccaaaatcccctcagcctcttctctgcacgttgctgaaggtnnnnnnnnnnnnnnnnnnncatgcttgagcaataaagtggaaac

SEQ ID NO: 4394 - DNA, 415 bp, Homo sapiens
gttaacacaaaatccatgggcagcatgatggcaggtcctctgttgcaaactcagttccaaagtcacaggaagaaagcagaaagttcaacttccaaagggttaggactctccactcaatgtcttaggtcaggagttgtgtctaggctggaagagccaaagaaatattccattttcctttccttgtggttgaaaccacagtcagtggagagatgtttggaacacagtcagtggagctggtggtaccaggtttagcattattggatgtcaaaagcattttttttgtcatgtagctgttttaagaaatctggcccagggtgtttgcagctgtgagaagtcactcacactggccacaaggacgctggctactgtctattaaaattctgatgtttctgtgaaattctcagagtgtttaatt

SEQ ID NO: 4395 - DNA, 553 bp, Homo sapiens
cctgaggctgtaactgagagaaagattctggggctgtcttatgaaaatatagacattctcacataagcccagttcatcaccatttcctcctttacctttcagtgcagtttcttttcacattaggctgttggttcaaacttttgggagcacggactgtcagttctctgggaagtggtcagcgcatcctgcagggcttctcctcctctgtcttttggagaaccagggctcttctcaggggctctagggactgccaggctgtttcagccaggaaggccaaaatcaagagtgagatgtagaaagttgtaaaatagaaaaagtggagttggtgaatcggttgttctttcctcacatttggatgattgtcataaggtttttagcatgttcctccttttcttcaccctcccctttgttcttctattaatcaagagaaacttcaaagttaatgggatggtcggatctcacaggctgagaactcgttcacctccaagcatttcatgaaaaagctgcttcttattaatcatacaaactctcaccatgatgtgaagagtttcac

SEQ ID NO: 4396 - DNA, 592 bp, Homo sapiens
  misc_feature (26)..(75): n includes a, c, g, or t, or contains no nucleotide
  misc_feature (86)..(138): n includes a, c, g, or t, or contains no nucleotide
  misc_feature (193)..(255): n includes a, c, g, or t, or contains no nucleotide
  misc_feature (312)..(332): n includes a, c, g, or t, or contains no nucleotide
  misc_feature (539)..(553): n includes a, c, g, or t, or contains no nucleotide
aatgtcacattccccagtgcagatannnnnnnnnnnnnnnnnnnnnnnnnnnnnnnnnnnnnnnnnnnnnnnnnncaaggaaattnnnnnnnnnnnnnnnnnnnnnnnnnnnnnnnnnnnnnnnnnnnnnnnnnnnnnaatctctgaaggggaaagaagtggagagaaaggtttgcttcacttcggggactgnnnnnnnnnnnnnnnnnnnnnnnnnnnnnnnnnnnnnnnnnnnnnnnnnnnnnnnnnnnnnnntgcttatatctgaagggaggtgggtggttttgctggatgtttggtctgaaagagttnnnnnnnnnnnnnnnnnnnnntaattgtagttatattttctgtgtgcttttttttaattactaagaaaaaaattggtgagttcagtagctttggtattatgagtgcaaatcataatagctccaatgtgaaaaaaaaaatcaaaagtataacttgtcacttaatgttagaaaattgcctaaaatgcagtgtaataaataatctctgtaccaaatagtaatttaaatggnnnnnnnnnnnnnnnggaaaatgtactgtttttatgtttccaaccctcttgaat

SEQ ID NO: 4397 - DNA, 529 bp, Homo sapiens
cggcagggctgctacctcctcagagtttcagaagcccccacatgggggctctaggaatgccggcatgctggtctttccgacctggtgctcttctgctgggggactgaggctggccctcattcggggtcgggaaccaagggtgtgtctgctctttccctccccatcctctggcagaaatcagctagacgctataccgtggactctccctggtccaccaccatgttgaagcccttggcagcctgagagctccaaggaacaagctgtgacaaccaggagccctgtctgtgggttcgtctgcccagggcctggagcccaagccctgtgttcctggggaagctggggacttgggaagtgatgggtgtgtcatgttgcgtgtgtctgtctgtgagcctttcacacctgtgctggcgctggaaaattatttgtgctcagctgacatttaacacttcctcccccgcttcctcctagccctgtgggcaggggttggaaacttagcactttatatttatacagaacattcaggatttgt

SEQ ID NO: 4398 - DNA, 561 bp, Homo sapiens
  misc_feature (112)..(136): n includes a, c, g, or t, or contains no nucleotide
  misc_feature (156)..(190): n includes a, c, g, or t, or contains no nucleotide
  misc_feature (228)..(245): n includes a, c, g, or t, or contains no nucleotide
  misc_feature (268)..(284): n includes a, c, g, or t, or contains no nucleotide
  misc_feature (291)..(315): n includes a, c, g, or t, or contains no nucleotide
  misc_feature (457)..(480): n includes a, c, g, or t, or contains no nucleotide
ggtgcccatctcacaagcatcctgtctcacgaagaacaaatgtttgttaatcgtgtgggccatgattatcagtggataggcctcaatgacaagatgtttgagcatgacttcnnnnnnnnnnnnnnnnnnnnnnnnnaatacgagaattggagaccnnnnnnnnnnnnnnnnnnnnnnnnnnnnnnnnnnnactgtgttgtaatcatttggcatgagaatggccagtgnnnnnnnnnnnnnnnnnnttaccatctcacctatacgtgcnnnnnnnnnnnnnnnnnttgcggnnnnnnnnnnnnnnnnnnnnnnnnnaagacctttggaaagatgaaacctcgttatgaaatcaactccctgattagataccactgcaaagatggtttcattcaacgtcaccttccaactatccggtgcttaggaaatggaagatgggctatacctaaaattacctgcnnnnnnnnnnnnnnnnnnnnnnnnacttattctatgaaatactttaaaaattcctcatcagcaaaggacaattcaataaatacatccaaacatgatcatcgttgg

SEQ ID NO: 4399 - DNA, 436 bp, Homo sapiens
  misc_feature (190)..(190): n includes a, c, g, or t, or contains no nucleotide
  misc_feature (219)..(219): n includes a, c, g, or t, or contains no nucleotide
  misc_feature (273)..(273): n includes a, c, g, or t, or contains no nucleotide
  misc_feature (294)..(294): n includes a, c, g, or t, or contains no nucleotide
  misc_feature (305)..(305): n includes a, c, g, or t, or contains no nucleotide
  misc_feature (310)..(310): n includes a, c, g, or t, or contains no nucleotide
gccttggttgcttaacattatttgtaaaccattattttctgcatcttgcatggtgcacaatagaatatcttttactgtaatcccttacaataaagccttaatagccattttctatgtaatatgcaaaagtagattagcacaatgcacaattttcttttgttaaaaatcaaattcaaagatttaattcttnctatgaattctaaagttcggcaaaccaantcatcataaaatccaaataatcttgtaacctatttatctagtgattcatctccnattctgttgaaaaagcataanataaatgttgntgagnctagactctaatggatatgtttatataattccaaacactcaggtgtgtgaatgcatttaaaaacattaatggaaaataatgctgataatatttaattgatcatgcaattccttcaattatgatgga

SEQ ID NO: 4400 - DNA, 416 bp, Homo sapiens
  misc_feature (26)..(26): n includes a, c, g, or t, or contains no nucleotide
  misc_feature (34)..(35): n includes a, c, g, or t, or contains no nucleotide
  misc_feature (37)..(51): n includes a, c, g, or t, or contains no nucleotide
  misc_feature (121)..(121): n includes a, c, g, or t, or contains no nucleotide
tgcaagtccagtttcatccctgtaangcaaatgnntnnnnnnnnnnnnnnngtgccatatagacgagataaaggcagctaaaacgagggcagtagagagcacttacccgaccccaaggtgnccagagatgccctgaggatggtggttaaggaaacaggagcaggaaatgtacacacagattcctgtccctttgccaactactccttccccatcaaagaaaaacacttgcacacagtaactaccagctccttctctcaaacttgtatttctcctggaaatgtatctcagaaatgacctcctctcccaaccacttcaacgattctttctttgggtttggggttcttgcagttctatcatctaaaataacctttggactgcaggtaaaatgcaattaggacaactaaccaagtagacga

SEQ ID NO: 4401 - DNA, 464 bp, Homo sapiens
  misc_feature (43)..(94): n includes a, c, g, or t, or contains no nucleotide
  misc_feature (136)..(150): n includes a, c, g, or t, or contains no nucleotide
  misc_feature (208)..(208): n includes a, c, g, or t, or contains no nucleotide
  misc_feature (340)..(350): n includes a, c, g, or t, or contains no nucleotide
  misc_feature (352)..(355): n includes a, c, g, or t, or contains no nucleotide
  misc_feature (362)..(363): n includes a, c, g, or t, or contains no nucleotide
  misc_feature (365)..(366): n includes a, c, g, or t, or contains no nucleotide
  misc_feature (368)..(368): n includes a, c, g, or t, or contains no nucleotide
  misc_feature (370)..(386): n includes a, c, g, or t, or contains no nucleotide
taccaggatgtgctattaagagcacgtatccattattcttctnnnnnnnnnnnnnnnnnnnnnnnnnnnnnnnnnnnnnnnnnnnnnnnnnnnngccaaagcacatgcaggctcctggttgttcctctcaaacctnnnnnnnnnnnnnnntagtaaccagttatacccagtattttgaggttttattgtttttttaataactaaaaanaaaaaaggaacagtgtaaatttgtaatcaagagtttgtgaggaaaaacttatggtttttggttttgtttgtttttgtaggtctgtgtatcaaatatgacacttttcttgcaataaagcttattttggggtannnnnnnnnnnannnnaaaaaannannanannnnnnnnnnnnnnnnntttgcgggaggggctgggggctttgtctatgggaacctgtattgaagtaataatagagagccagacacacaggaaaat

SEQ ID NO: 4402 - DNA, 478 bp, Homo sapiens
  misc_feature (146)..(146): n includes a, c, g, or t, or contains no nucleotide
  misc_feature (200)..(200): n includes a, c, g, or t, or contains no nucleotide
  misc_feature (348)..(365): n includes a, c, g, or t, or contains no nucleotide
  misc_feature (422)..(436): n includes a, c, g, or t, or contains no nucleotide
tggggtcctcacatggcgtcctgcccttgctccagcctgacaacagcctgagaaatccccccgtaacttattatcactttggggttcggcctgtgtcccccgaacgctctgcaccttctgacgcagcctgagaatgacctgccctngccccagccctactctgtgtaatagaataaaggcctgcgtgtgtctgtgttgancgtgcgtctgtgtgtgcctgtgtgcgagtctgagtcagagatttggagatgtctctgtgtgtttgtgtgtatctgtgggtctccatcctccatgggggctcagccaggtgctgtgacaccccccttctgaatgaagccttctgacctnnnnnnnnnnnnnnnnnngtgaggacacattgccccatgagacagtcccagaacacggcagctgctggctgtgannnnnnnnnnnnnnnccttagaccaagggatgggacctgatgacctgggaggactct

SEQ ID NO: 4403 - DNA, 373 bp, Homo sapiens
  misc_feature (173)..(173): n includes a, c, g, or t, or contains no nucleotide
  misc_feature (175)..(175): n includes a, c, g, or t, or contains no nucleotide
  misc_feature (177)..(177): n includes a, c, g, or t, or contains no nucleotide
  misc_feature (179)..(180): n includes a, c, g, or t, or contains no nucleotide
  misc_feature (195)..(224): n includes a, c, g, or t, or contains no nucleotide
  misc_feature (257)..(257): n includes a, c, g, or t, or contains no nucleotide
  misc_feature (286)..(286): n includes a, c, g, or t, or contains no nucleotide
ccacctggctcagttggccttctggcccctgagactctttcacagcttggcatggggcagctggaccccgggggagggtgtgcattggtacccccagctgctctaccgcctggggcgtctcctgctagaagagggcagcttccacccactgggcatgtccggggcagggagcngnangnnctccaccgctgcccnnnnnnnnnnnnnnnnnnnnnnnnnnnnnnctctcagccaggagggagctggccctggaaggnacctgagctgggggacactggctcctgcnatctcctctgccatgaagatacaccattgagacttgactgggcaacaccagcgtcccccacccgcgtcgtggtgtagtcatagagct

SEQ ID NO: 4404 - DNA, 411 bp, Homo sapiens
  misc_feature (72)..(73): n includes a, c, g, or t, or contains no nucleotide
  misc_feature (271)..(271): n includes a, c, g, or t, or contains no nucleotide
  misc_feature (288)..(288): n includes a, c, g, or t, or contains no nucleotide
ggtaaagcaatactgccgctgcccccaccctgcttctgctgcctgtttggggaggggggcggtgaggtgggnncagcggccccgcacccctcctccttgctgatttgcacacattggccgcttcagacacgcacttctggggccagcccctccccgcctcctccctgcctggcggcaggggtcgcgatgatgggctggagcagtttggggcagggggttctgggacccactccgactccccctccccggcatcatttcccctcccgcttcntccggctggacctgggntcccccctccctgtaatgcactcctgccccggcccaacctcgccctctctcaccagccttgaactgtggccacctagaaaggggcccattcagcctcgtctctttacagaagtagttttgttc

SEQ ID NO: 4405 - DNA, 63 bp, Homo sapiens
cctggccatgagcctgtctccgaccctgaagggcaggctgttgctgatgaggcccaaggcagg

SEQ ID NO: 4406 - DNA, 587 bp, Homo sapiens
  misc_feature (28)..(88): n includes a, c, g, or t, or contains no nucleotide
  misc_feature (112)..(112): n includes a, c, g, or t, or contains no nucleotide
  misc_feature (137)..(137): n includes a, c, g, or t, or contains no nucleotide
  misc_feature (143)..(143): n includes a, c, g, or t, or contains no nucleotide
  misc_feature (238)..(238): n includes a, c, g, or t, or contains no nucleotide
  misc_feature (500)..(528): n includes a, c, g, or t, or contains no nucleotide
ccagggcaaggcaggcatcaagatcctnnnnnnnnnnnnnnnnnnnnnnnnnnnnnnnnnnnnnnnnnnnnnnnnnnnnnnnnnnnnnaccgaggcactggcagcgacagcngtcactcagctcacagtggtgccgntggganctgcagtgacagccgatgagacggaagtcctgaaggccgagatcagcaaagctgtgaagcaagtgcaggaagaagaccccaacactcacatcctntacgcctgtgactcctgtggggacaagtttctggatgccaacagcctggctcagcatgtgcgaatccacacagcccaggcactggtcatgttccagacagacgcggacttctatcagcagtatgggccaggtggcacgtggcctgccgggcaggtgctgcaggctggggagctggtcttccgccctcgcgacggggctgagggccagcccgcactggcagagacctcccctacagctcctgaatgtcccccgcctgccgagnnnnnnnnnnnnnnnnnnnnnnnnnnnnntaaggatggatggcaccctggaaccgggaagggtggcctgttccctagagagaataaat

SEQ ID NO: 4407 - DNA, 362 bp, Homo sapiens
  misc_feature (112)..(112): n includes a, c, g, or t, or contains no nucleotide
  misc_feature (139)..(139): n includes a, c, g, or t, or contains no nucleotide
  misc_feature (142)..(142): n includes a, c, g, or t, or contains no nucleotide
  misc_feature (148)..(148): n includes a, c, g, or t, or contains no nucleotide
  misc_feature (160)..(162): n includes a, c, g, or t, or contains no nucleotide
  misc_feature (197)..(197): n includes a, c, g, or t, or contains no nucleotide
gaaatggatcctcatttgtaaatcttttttcttccattttcacaaagctgtaaagaaataatccatctcaaccttaccctttttctctggagtcagtggggtctttcctcgntccatcttacacagacctgagctggangcntcaacntggttttgttcnnntgtttgaaatattgtgatctccctcccatgaaagnaaaaccaagaaccagaggcgtagactgactgaagacacaactcctggctttctgaagctatggacttggattggattgctgggggtttgtagagaaaggtgacaaatttcagtacctctggcatgctgtcccaggaaactagggctcccactaacttatgaggtt

SEQ ID NO: 4408 - DNA, 437 bp, Homo sapiens
  misc_feature (78)..(78): n includes a, c, g, or t, or contains no nucleotide
  misc_feature (115)..(115): n includes a, c, g, or t, or contains no nucleotide
  misc_feature (338)..(338): n includes a, c, g, or t, or contains no nucleotide
  misc_feature (355)..(355): n includes a, c, g, or t, or contains no nucleotide
ctaaagcaccgactggagaggaaggcaacagagacaaggagagaagccgagagacatgtctgcgtgctgccacgcatntgagcgattgctctgtgaagagttgtacactgaacantttcaggggaggctgtttacccaggcaatgtcctcaaacaagcctgtgccggggtgtcctggaatctgtgccaggactgtgtttttagcccttcacctctcagctttagcaggacatgaaccagttataacaagatggccctgcagctggttacaagaatgtgacatggcaggatctatggaaccaaatggaaggttttgaggtgatgtaggtctttcacagntagctttggggaatacngaatactcaaataaagtgctttgttattatttcagagggaatggcgattgaaatgttacaacagagatttcttggtggtagc

SEQ ID NO: 4409 - DNA, 602 bp, Homo sapiens
aagccctggacgatctgcacaagatgaaccacgtgacaccccccaacgtgtccctgggcgctaccggggggcccccggctgggcccgggggcgtctacgccggcccggagccacctcccgtttacaccaacctcagcagctactccccagcctctgcgtcctcgggaggcgccggggctgccgtcgggaccgggagctcgtacccgacgaccaccatcagctacctcccacacgcgccgcccttcgccggtggccacccggcgcagctgggcttgggccgcggcgcctccaccttcaaggaggaaccgcagaccgtgccggaggcgcgcagccgggacgccacgccgccggtgtcccccatcaacatggaagaccaagagcgcatcaaagtggagcgcaagcggctgcggaaccggctggcggccaccaagtgccggaagcggaagctggagcgcatcgcgcgcctggaggacaaggtgaagacgctcaaggccgagaacgcggggctgtcgagtaccgccggcctcctccgggagcaggtggcccagctcaaacagaaggtcatgacccacgtcagcaacggctgtcagctgctgcttggg

SEQ ID NO: 4410 - DNA, 57 bp, Homo sapiens
cctgtctgcatctgactgagcagaacaaatcgtcaggtgcctggagcaaaaaggaaa

SEQ ID NO: 4411 - DNA, 90 bp, Homo sapiens
  misc_feature (42)..(42): n includes a, c, g, or t, or contains no nucleotide
agactcctagctgtcctttttcctctccacacagtgctcaanggccagcttatagtcatatatatcacccagacataaaggaaaagacac

SEQ ID NO: 4412 - DNA, 391 bp, Homo sapiens
tgccagatcattattccacagaaccaagtcaatcgaaagtcagatatctacgtctgcatgatctcctttgcgcacaatgtagcagcacaagggaagtacattgctatagttagtacaactgtggaaaccaaggagcctgagaaggaaatcagaccagctttggagctcttggaaccaattgaacagaaatttgttagcatcagtgacctcctggtaccaaaagacttgggaacagaaagccagatctttatttcccgcacatatgatgccaccactcattttgagacaacgtgtgatgacattaaaaacatctataagaggatgacaggatcagagtttgactttgaggaaatgaagcgcaagaagaatgacatctatggggaagactaac

SEQ ID NO: 4413 - DNA, 354 bp, Homo sapiens
  misc_feature (35)..(95): n includes a, c, g, or t, or contains no nucleotide
  misc_feature (156)..(170): n includes a, c, g, or t, or contains no nucleotide
tgcagcctttggtagctaacagtcactgattttannnnnnnnnnnnnnnnnnnnnnnnnnnnnnnnnnnnnnnnnnnnnnnnnnnnnnnnnnnnnggaggtaaataaactaagatattccgagggaagggacccaggccacctcccttccgcaggnnnnnnnnnnnnnnnttttttgaatgaaatgccactgtgcattttcagaaaaaaaaatctctgataaacagactttgaatggatgtttgttcctcctgattctcttttctcttcgtggcgacttagagttggcggatattcggaactgtgaatgtacatagcgttgagttaaaccccttgtgtgtgagacaggacgcag

SEQ ID NO: 4414 - DNA, 475 bp, Homo sapiens
  misc_feature (119)..(119): n includes a, c, g, or t, or contains no nucleotide
  misc_feature (157)..(157): n includes a, c, g, or t, or contains no nucleotide
  misc_feature (163)..(190): n includes a, c, g, or t, or contains no nucleotide
  misc_feature (218)..(218): n includes a, c, g, or t, or contains no nucleotide
  misc_feature (222)..(264): n includes a, c, g, or t, or contains no nucleotide
  misc_feature (285)..(285): n includes a, c, g, or t, or contains no nucleotide
  misc_feature (288)..(308): n includes a, c, g, or t, or contains no nucleotide
  misc_feature (312)..(312): n includes a, c, g, or t, or contains no nucleotide
  misc_feature (360)..(360): n includes a, c, g, or t, or contains no nucleotide
tgaaaaaatgcagaccgccggggcattattcatttctccagctctgatccgctgttgtaccaggggtctaatcaggcctgtgtctgcctccttcttgaatagcccagtgaattcatctnaaacagccttcctacagcaacttcccactccaggtggnccagannnnnnnnnnnnnnnnnnnnnnnnnnnntcccgggacattgacacagcagccaagntttnnnnnnnnnnnnnnnnnnnnnnnnnnnnnnnnnnnnnnnnnnngggctggcattggaaccgtgnttnnnnnnnnnnnnnnnnnnnnnatgnccaggaacccgtctctcaagcagcagctcttctcctatgccattcttngctttgccctgtctgaggccatggggcttttctgtttgatggtcgccttcctcatcctcttcgccatgtgaggctccatggggggtcaccggcctgttgctactgcaactccaca

SEQ ID NO: 4415 - DNA, 138 bp, Homo sapiens
cttcggtcacaaagagttacatctcatcacagacaaatggagaaatgggacaacttgtccatcgtttcactgtaccaggcatgaggatgtggcctgcatgctgcctgatcttgcctagaaccggctgcacctgctgtt

SEQ ID NO: 4416 - DNA, 337 bp, Homo sapiens
  misc_feature (26)..(61): n includes a, c, g, or t, or contains no nucleotide
  misc_feature (134)..(150): n includes a, c, g, or t, or contains no nucleotide
  misc_feature (162)..(218): n includes a, c, g, or t, or contains no nucleotide
ttaaaaatgcatgcaaactgaaagcnnnnnnnnnnnnnnnnnnnnnnnnnnnnnnnnnnnnaggagctttgtacaatgaaaaagtgggagcaaatgaaaggaaaagaaaacgaagaacaactataagcattgcnnnnnnnnnnnnnnnnnagagacactttnnnnnnnnnnnnnnnnnnnnnnnnnnnnnnnnnnnnnnnnnnnnnnnnnnnnnnnnnctggagaaagaagtagtaagagtttggttttgcaaccggaggcagagagaaaaacgggtgaaaacaagtctgaatcagagtttattttctatttctaaggaacatcttgagtgcagata

SEQ ID NO: 4417 - DNA, 475 bp, Homo sapiens
  misc_feature (35)..(64): n includes a, c, g, or t, or contains no nucleotide
aatgacaagggtggacctcaggaattacctcgagnnnnnnnnnnnnnnnnnnnnnnnnnnnnnncggacacgggtgcagcatggctctaacaagagaagagatcacagaaacgtgaggatcaagaagccggactacaaggtcgcctacgtgcagctggcccatggacagaccttcacgttcccagatctgtttcccgagaaagacgagagccctgaaggcagcgctgccgacgacctctacagcatgctcgaggaggagaggcagcagaggcagagcagcgacccgcggcggggcggcgtccccagctggttcgggctgtgacggggtggccagcagggacgcgccccaggtgggcagctgtggcagagcagcgacccgcggcggggcggcatccccagctggttcgggccgtgacggggcggccagcagggacgcgccccaggtgggcagctgtggcagagcagtcccgacacc

SEQ ID NO: 4418 - DNA, 223 bp, Homo sapiens
cccaaacagaacaggcttttagaagataaaagcgacaagaaggaatctggtgaattttagtcatcccagctttttagtcttaaccacagttctcactctcttaaatggtacctcaaaaagctggagcctctctgccatgattatgcttctacaaatttcttttataaagagactcaaagctaatgatagcttaaaagaaaagttaatgccttctcattggaaa

SEQ ID NO: 4419 - DNA, 466 bp, Homo sapiens
  misc_feature (49)..(49): n includes a, c, g, or t, or contains no nucleotide
  misc_feature (286)..(287): n includes a, c, g, or t, or contains no nucleotide
  misc_feature (420)..(420): n includes a, c, g, or t, or contains no nucleotide
tgagctacaggactcccgagtgtgagccgcggttcctctgttgcagcgnagccgtgtgtgctgtggagccgaggccgtcctgcaggaagccgcgtgactcccgcctcctccctgtgctctctggctctggactgtgactgcgcctggattctgccattgcgacacatttttgtgcctttcagcccctggtgtctgcagtgggggatttaaggcacccgcttccacttctttcttgtttggagttttctgttggaaccgccggcgttggctccgaagacttagcgannccactggcggcaccttctcctgcgcccagtgatgtttccacggtgcctgtacacagccgagcagcatttccgttgaaggacttgcatccccattgcgggcagtgctggacgtgtcccggagacccaccggganggcgccgccatgccttgtacccccaccgtgcaggttgtggccggtt

SEQ ID NO: 4420 - DNA, 572 bp, Homo sapiens
ggagctgctcggatgtcagtttattcctaaaggtcgtcctccaaaacttactcaacctccacctcctcggaacagcaatgacctcaaaaacactacagcccctccaaaaatagccaaaggtcgtgccccaaaatttacgcaaccactacaacctcgcagtagcaatgaatttcctgcacagacagaacaaacaactgccagtcctgatatcagaaatactaccgtaactccaaatgtaaccaaagatgtagcgctggctgcagttcttgtccctgtgctggtcatggtcctcactactctcattctcatattagtgtgtgcttggcactggagaaacagaaagaaaaaaactgaaggcacctatgacttaccttactgggaccgggcaggtaactcacgtggtctttgcatctcatttctatcagagggatgtcgctcccctacagggggcagtagtgaaaaaagagtcattctctggcccaggtgaactccccgacactgttagaacaatggcattactcttcagttctcaccatttttacccttctgcaaagtctcttgtaattcctaag

SEQ ID NO: 4421 - DNA, 443 bp, Homo sapiens
  misc_feature (27)..(27): n includes a, c, g, or t, or contains no nucleotide
  misc_feature (186)..(186): n includes a, c, g, or t, or contains no nucleotide
  misc_feature (269)..(269): n includes a, c, g, or t, or contains no nucleotide
  misc_feature (275)..(275): n includes a, c, g, or t, or contains no nucleotide
  misc_feature (318)..(318): n includes a, c, g, or t, or contains no nucleotide
agcctcacgggacagaacacggccacnaacccccctggcctcactggggtgagcttctcctcctcgtcgtcatcgtcctcctccagctcgcccagcaacgagaacgccacaagcaactcgtgagcccacgtcggccgtcgggaaagcacggggcctttcccacccaccctcagccagcgccacacnggcacccacagactgggtgccccggcggcgccacgcttggctggtcagcgctgcaggtcccgcctgttccagggcaggacccnggcccngcccaccggccccctggcttgggaaggcgtgggccacatggtnccctctggggcgtccccagcctccccgtcctctgtctaacctcaccctctaaacgttcagcggtggaaagatttttataattttaaattattactgctttgaaataaacggacgtttgagctcaa

SEQ ID NO: 4422 - DNA, 406 bp, Homo sapiens
  misc_feature (229)..(229): n includes a, c, g, or t, or contains no nucleotide
  misc_feature (289)..(289): n includes a, c, g, or t, or contains no nucleotide
  misc_feature (301)..(301): n includes a, c, g, or t, or contains no nucleotide
  misc_feature (305)..(305): n includes a, c, g, or t, or contains no nucleotide
  misc_feature (318)..(318): n includes a, c, g, or t, or contains no nucleotide
gagtttggttttgcaaccggaggcagagagaaaaacgggtgaaaacaagtctgaatcagagtttattttctatttctaaggaacatcttgagtgcagataagatttttctattgtataatagcctttttctcccgtttcattcctttctcttcctcaacaaaaacagaaattacttggttgacttaaaatcattttatatcaatagcttttacagaagctttacttttncacttttttttaaaaaaaagaaaccaacaatttaaattatattgatgttatttacttaanataattattctncagnaagccacattatnctattttaagccaaatatattaacagtaataaaatgatctctctgtctctcccgctctctttctcacacacacgcagacatatgagta

SEQ ID NO: 4423 - DNA, 587 bp, Homo sapiens
ccatcactcctgtgcctgctggggtggctgtggggcgtggcaggaggggcctaggtgggttgggcctgagaaccagggcacgggtgtggtgtctgctgggctggagataagactggggagagacaccccaacctcccagggtgggagctgggccgggctgggatgtcatctcctgccgggcgggggagggctctgcccctggaagagtcccctgtggggaccaaaataagttccctaacatctccagctcctggctctggtttggagcaaggggaagggttgccagagtcctgggggccccagaggagcaggagtctgggagggcccagagttcaccctctagtggatccaggaggagcagcacccgagccctggagtggcccagtacccttccaagaggccacagtcccagccaggacaaagtatgcggcccatcctggtgcgacagcgtgggacaatgtgaacatggactcgaagacatggccctttctctgtagttgattttttaaatgtgccattattgtttttaaaaaaaaaggaaaaaagaaaagcaaacaaataaaacacctttaagaggcttgaaagag

SEQ ID NO: 4424 - DNA, 482 bp, Homo sapiens
  misc_feature (97)..(97): n includes a, c, g, or t, or contains no nucleotide
  misc_feature (99)..(99): n includes a, c, g, or t, or contains no nucleotide
  misc_feature (102)..(105): n includes a, c, g, or t, or contains no nucleotide
  misc_feature (107)..(107): n includes a, c, g, or t, or contains no nucleotide
  misc_feature (111)..(111): n includes a, c, g, or t, or contains no nucleotide
  misc_feature (115)..(140): n includes a, c, g, or t, or contains no nucleotide
  misc_feature (426)..(426): n includes a, c, g, or t, or contains no nucleotide
  misc_feature (430)..(430): n includes a, c, g, or t, or contains no nucleotide
gagatagctccctgagctgggccatctgacttctacctcccatgtttgctctcccaactcattagctcctgggcagcatcctcctgagccacatgtncnggnnnngnaaancctnnnnnnnnnnnnnnnnnnnnnnnnnnactcttcatcacaactagatttgcctcttctaagtgtctatgagcttgcaccatatttaataaattgggaatgggtttggggtattaatgcaatgtgtggtggttgtattggagcagggggaattgataaaggagagtggttgctgttaatattatcttatctattgggtggtatgtgaaatattgtacatagacctgatgagttgtgggaccagatgtcatctctggtcagagtttacttgctatatagactgtacttatgtgtgaagtttgcaagcttgctttnaggnctgagccctggactcccagcagcagcacagttcagcattgtgtggctggttg

SEQ ID NO: 4425 - DNA, 422 bp, Homo sapiens
  misc_feature (215)..(229): n includes a, c, g, or t, or contains no nucleotide
ttacacagcataggtgaaaatcatatttgggctattgtatactatgaacaatttgtaaatgtcttaatttgatgtaaataactctgaaacaagagaaaaggtttttaacttagagtagccctaaaatatggatgtgcttatataatcgcttagttttggaactgtatctgagtaacagaggacagctgttttttaaccctcttctgcaagtttgnnnnnnnnnnnnnnntaatatggatactaaaaatactacattgatctaagaagaaactagccttgtggagtatatagatgcttttcattatacacacaaaaatccctgagggacattttgaggcatgaatataaaacatttttatttcagtaacttttccccctgtgtaagttactatggtttgtggtacaacttcattctatagaat

SEQ ID NO: 4426 - DNA, 260 bp, Homo sapiens
catgagtcaaaatccgctctccatgcttactcttgacaccccattgaagccactcattgtgtgtgcgtctgggtgtgaagtccagctccgtgtggtcctgtgcttgtactgccctgctttgcagttcctttgcacttactcatcgagtgctgttttgaaatgctgacattatataaacgtaaaagaaaatgtaaaaaaaaaaaacccacacacaaacaaacccatacgatctgtatttgtatatacacgtgtccgtacaa

SEQ ID NO: 4427 - DNA, 211 bp, Homo sapiens
ttttggtgactctgtgcccttgctctctaacttctgagcccacctcccagggtaggcacctgggggcatgcaggtgcccacctcccagggtaggcacctgggggcatgcaggtacccacctctttctcttgggtgaggctctggcaaggagatctctctgctcaagcacagcagaatcatggcccctctccatgaattggaacttggtaca

SEQ ID NO: 4428 - DNA, 443 bp, Homo sapiens
  misc_feature (28)..(28): n includes a, c, g, or t, or contains no nucleotide
  misc_feature (126)..(146): n includes a, c, g, or t, or contains no nucleotide
cttttggagatccttgtcagttttattntctatttgatgaagtaagactgtggactcaatccagagccagatagtagggggaagccacagcatttccttttaactcagttcaatttttgtagtgannnnnnnnnnnnnnnnnnnnnttgcgtgcatgcatacctcatcagtgattgtacataccttgcccactcctagagacagctgtgctcaccttttcctgctttgtgccttgattaaggctactgaccctaaatttctgaagcacagccaagaaaaattacattccttgtcattgtaaattacctttgtgtgtacatttttactgtatttgagacattttttgtgtgtgactagttaattttgcaggatgtgccatatcattgaacggaactaaagtctgtgacagtggatatagctgctggaccattccatcttatatg

SEQ ID NO: 4429 - DNA, 525 bp, Homo sapiens
  misc_feature (170)..(173): n includes a, c, g, or t, or contains no nucleotide
  misc_feature (287)..(289): n includes a, c, g, or t, or contains no nucleotide
  misc_feature (318)..(321): n includes a, c, g, or t, or contains no nucleotide
  misc_feature (323)..(323): n includes a, c, g, or t, or contains no nucleotide
  misc_feature (369)..(391): n includes a, c, g, or t, or contains no nucleotide
ctgcagtcgatttgggatttgctaagtagttttacagagctagatctgtgtgcatgtgtgtgtttgtgtatatatacatatctagggctagtacttagtttcacacccgggagctgggagaaaaaacctgtacagttgtctttctcttatttttaataaaatagaaaaannnngcacttgcgcgtcccccccccacccccttttttaaacaagtgttacttgtgccgggaaaattttgctgtctttgtaattttaaaactttaaaataaattggaaaagggagaaannnaaaaaaaaaaaaaaaaaaaaaaaaaaaannnnanaatgaatgcggagcggttaggcgggcaggcagtggggacatctggnnnnnnnnnnnnnnnnnnnnnnnggggagggttcaggagctggacagaagccaggaatccttagtcccggaggctgcggaacgtgccttagccggcttctaggcttctgcctttggggtccagagggtaccccatttccggccgagaggtgagtacg

SEQ ID NO: 4430 - DNA, 601 bp, Homo sapiens
  misc_feature (38)..(38): n includes a, c, g, or t, or contains no nucleotide
  misc_feature (47)..(47): n includes a, c, g, or t, or contains no nucleotide
  misc_feature (56)..(56): n includes a, c, g, or t, or contains no nucleotide
  misc_feature (79)..(79): n includes a, c, g, or t, or contains no nucleotide
  misc_feature (95)..(95): n includes a, c, g, or t, or contains no nucleotide
  misc_feature (175)..(175): n includes a, c, g, or t, or contains no nucleotide
  misc_feature (181)..(181): n includes a, c, g, or t, or contains no nucleotide
  misc_feature (188)..(188): n includes a, c, g, or t, or contains no nucleotide
  misc_feature (196)..(196): n includes a, c, g, or t, or contains no nucleotide
  misc_feature (213)..(213): n includes a, c, g, or t, or contains no nucleotide
  misc_feature (259)..(318): n includes a, c, g, or t, or contains no nucleotide
  misc_feature (459)..(482): n includes a, c, g, or t, or contains no nucleotide
tcaaaattttgaggtcccaaacagaattatcgaaatancaaataaanctcccaagntcagtcaactttacaagcaagcntctggaacaatggtgnatgggttgtttatgttacaaaagaaaagcgtacacaagaagaacacaatttatgaaatacaggataatacaggatccatngatgtngtggggngtggaaantggcacaatatcaagtntgagaaaggagataaacttcgactcttctgccttcaactgagaacnnnnnnnnnnnnnnnnnnnnnnnnnnnnnnnnnnnnnnnnnnnnnnnnnnnnnnnnnnnnggccaagaaaaacaaggaaggaccaatgaatgttaattgaaatatgaaagctgaaatgcaacaaacaacttccgcttaaaacaattaagttgttaataactgtgattttgtaaatttcagtaattcatttaaatgatgttnnnnnnnnnnnnnnnnnnnnnnnnaagagcttttataactgagttatagattagtttgctttctggaataaaattttcttcttatactcttccttttttttagatattacattttgcttttatgacattcacgaggcaaaaaa

SEQ ID NO: 4431 - DNA, 579 bp, Homo sapiens
  misc_feature (32)..(71): n includes a, c, g, or t, or contains no nucleotide
  misc_feature (91)..(91): n includes a, c, g, or t, or contains no nucleotide
  misc_feature (96)..(96): n includes a, c, g, or t, or contains no nucleotide
  misc_feature (113)..(113): n includes a, c, g, or t, or contains no nucleotide
  misc_feature (134)..(134): n includes a, c, g, or t, or contains no nucleotide
  misc_feature (184)..(184): n includes a, c, g, or t, or contains no nucleotide
  misc_feature (188)..(188): n includes a, c, g, or t, or contains no nucleotide
aacctctcttgctgtgctggggaagggttgtnnnnnnnnnnnnnnnnnnnnnnnnnnnnnnnnnnnnnnnnaactgtatcccacaatgatncggcnagacaggcatgggaatnggcagcaccatggcccgagtngggcagcatcgtgagcccactggtgagcatgactgccgagctctaccccnccantgcctctcttcatctacggtgctgttcctgtggccgccagcgctgtcactgtcctcctgccagagaccctgggccagccactgccagacacggtgcaggacctggagagcaggaaagggaaacagacgcgacagcaacaagagcaccagaagtatatggtcccactgcaggcctcagcacaagagaagaatggactctgaggactgagaaggggccttacagaaccctaaagggagggaaggtcctacaggtctccggccacccacacaaggaggaggaagaggaaatggtgacccaagtgtgggggttgtggttcaggaaagcatcttcccaggggtccacctccctttataaaccccaccagaaccacatcattaaaaggtttgactgc

SEQ ID NO: 4432 - DNA, 583 bp, Homo sapiens
  misc_feature (76)..(104): n includes a, c, g, or t, or contains no nucleotide
  misc_feature (416)..(471): n includes a, c, g, or t, or contains no nucleotide
tcgccggcatcgtgaccggggtcctggtcggagtggcgctggtggccgcgctggtgtgtttcctgctccttgccannnnnnnnnnnnnnnnnnnnnnnnnnnnnctcaaggagcagcagccccaagcccttgcccctggccgtggtccctcccacagctctgccttctcgatgtcccctctctccactgcccaggcccccctacccaaccccaggacagcagcttccatctatgaggaattgctaaaacatgacacaaacatttacagccggatggaccacaaagcagaagtggcttcttagcttcctccaggagctgctcctgtgtgttgatggagagtccccaaggcccccagccctggggatggggaaggacatgaagcctgagccagagaaccagctataagtcctgagaannnnnnnnnnnnnnnnnnnnnnnnnnnnnnnnnnnnnnnnnnnnnnnnnnnnnnnnctcgacagcctgccctaggccctgggtgggtcaggacaaaggcctctcatcaccgcagaaagcgggggcttgcagggaaagtgaatgggcctgtggcccacctggggtcact

SEQ ID NO: 4433 - DNA, 621 bp, Homo sapiens
  misc_feature (63)..(352): n includes a, c, g, or t, or contains no nucleotide
  misc_feature (378)..(378): n includes a, c, g, or t, or contains no nucleotide
  misc_feature (415)..(415): n includes a, c, g, or t, or contains no nucleotide
  misc_feature (423)..(423): n includes a, c, g, or t, or contains no nucleotide
  misc_feature (426)..(427): n includes a, c, g, or t, or contains no nucleotide
  misc_feature (430)..(435): n includes a, c, g, or t, or contains no nucleotide
  misc_feature (439)..(440): n includes a, c, g, or t, or contains no nucleotide
  misc_feature (442)..(479): n includes a, c, g, or t, or contains no nucleotide
  misc_feature (482)..(482): n includes a, c, g, or t, or contains no nucleotide
  misc_feature (486)..(493): n includes a, c, g, or t, or contains no nucleotide
  misc_feature (499)..(499): n includes a, c, g, or t, or contains no nucleotide
  misc_feature (501)..(501): n includes a, c, g, or t, or contains no nucleotide
  misc_feature (503)..(503): n includes a, c, g, or t, or contains no nucleotide
  misc_feature (505)..(507): n includes a, c, g, or t, or contains no nucleotide
  misc_feature (509)..(510): n includes a, c, g, or t, or contains no nucleotide
  misc_feature (515)..(521): n includes a, c, g, or t, or contains no nucleotide
  misc_feature (576)..(590): n includes a, c, g, or t, or contains no nucleotide
ggacacaggctccaaactggagcttgaaatagtgtctgatgaatgttaaattatctatctatnnnnnnnnnnnnnnnnnnnnnnnnnnnnnnnnnnnnnnnnnnnnnnnnnnnnnnnnnnnnnnnnnnnnnnnnnnnnnnnnnnnnnnnnnnnnnnnnnnnnnnnnnnnnnnnnnnnnnnnnnnnnnnnnnnnnnnnnnnnnnnnnnnnnnnnnnnnnnnnnnnnnnnnnnnnnnnnnnnnnnnnnnnnnnnnnnnnnnnnnnnnnnnnnnnnnnnnnnnnnnnnnnnnnnnnnnnnnnnnnnnnnnnnnnnnnnnnnnnnnnnnnnnnnnnnnnnnnnnnnnnnnnnnnnnggcctgattaaagttaaataaatacnagttcccttctcgtccaaaggagcagggaatgggaancgggaagncannaannnnnnaaannannnnnnnnnnnnnnnnnnnnnnnnnnnnnnnnnnnnnngcncctnnnnnnnnattcgncncngnnntnntgttnnnnnnnccgcctgcaacccattttccagacagtaaaaaggcggcgcacttctttctccgtnnnnnnnnnnnnnnnaaggaacccaagagtctgtgcctctgaggcc

SEQ ID NO: 4434 - DNA, 370 bp, Homo sapiens
  misc_feature (64)..(64): n includes a, c, g, or t, or contains no nucleotide
  misc_feature (127)..(127): n includes a, c, g, or t, or contains no nucleotide
  misc_feature (149)..(164): n includes a, c, g, or t, or contains no nucleotide
  misc_feature (256)..(256): n includes a, c, g, or t, or contains no nucleotide
  misc_feature (261)..(261): n includes a, c, g, or t, or contains no nucleotide
atcccatcctgagacctggtgcagggccagtggggaggcagcggcaccagactcaccaggccgngctcccatcgcctggggcctcctcactaggggccccaagttcaactcaacccctcaacagccntcagctttgcagcccctgagannnnnnnnnnnnnnnnaccagccagccatgagcgccttcctgcagaacacacagtgccttatgccacagccgaagaatccgtggggccggcaagcaggcaccttcccnccagntgcgctagcgggaaagagatggggatggagtcccaaggcaagcgccccaaacctcgggccacaagacaccacttcccctttaccctggacagcaggaaacctgtatatt

SEQ ID NO: 4435 - DNA, 444 bp, Homo sapiens
  misc_feature (36)..(36): n includes a, c, g, or t, or contains no nucleotide
  misc_feature (55)..(55): n includes a, c, g, or t, or contains no nucleotide
  misc_feature (59)..(59): n includes a, c, g, or t, or contains no nucleotide
  misc_feature (67)..(67): n includes a, c, g, or t, or contains no nucleotide
  misc_feature (78)..(78): n includes a, c, g, or t, or contains no nucleotide
  misc_feature (117)..(117): n includes a, c, g, or t, or contains no nucleotide
  misc_feature (137)..(137): n includes a, c, g, or t, or contains no nucleotide
  misc_feature (318)..(318): n includes a, c, g, or t, or contains no nucleotide
  misc_feature (331)..(350): n includes a, c, g, or t, or contains no nucleotide
cgcctaatgtgtttgagcatcacttaggagaagtcntctatttatttatttattnattnatttgttngttttagaagnttctatgttaatattttatgtgtaaaataaggttatgantgaatctacttgcacactcncccattatatttattgtttattttaggtcaaacccaagttagttcaatcctgattcatatttaatttgaagatagaaggtttgcagatattctctagtcatttgttaatatttcttcgtgatgacatatcacatgtcagccactgtgatagaggctgaggaatccaagaaaatggccagtnagatcaatgtgannnnnnnnnnnnnnnnnnnngtctattttgtaactgtaaagatgaatgtcagttgttatttattgaaatgatttcacagtgtgtggtcaacatttctcatgttgaagctttaag

SEQ ID NO: 4436 - DNA, 535 bp, Homo sapiens
ttccccaaagccagaagatgcacaaggaggaacatgaggtggctgtgctgggggcaccccccagcaccatccttccaaggtccaccgtgatcaacatccacagcgagacctccgtgcccgaccatgtcgtctggtccctgttcaacaccctcttcttgaactggtgctgtctgggcttcatagcattcgcctactccgtgaagtctagggacaggaagatggttggcgacgtgaccggggcccaggcctatgcctccaccgccaagtgcctgaacatctgggccctgattctgggcatcctcatgaccattggattcatcctgtcactggtattcggctctgtgacagtctaccatattatgttacagataatacaggaaaaacggggttactagtagccgcccatagcctgcaacctttgcactccactgtgcaatgctggccctgcacgctggggctgttgcccctgcccccttggtcctgcccctagatacagcagtttatacccacacacctgtctacagtgtcattcaat

SEQ ID NO: 4437 - DNA, 462 bp, Homo sapiens
  misc_feature (55)..(55): n includes a, c, g, or t, or contains no nucleotide
  misc_feature (63)..(63): n includes a, c, g, or t, or contains no nucleotide
  misc_feature (142)..(182): n includes a, c, g, or t, or contains no nucleotide
  misc_feature (213)..(213): n includes a, c, g, or t, or contains no nucleotide
cgagcaggtcttcaatgaggctcctggcatcagctgcaacccagtgcagggcgcnatgtactncttcccgcgcgtgcagctgcccccgcgggcggtggagcgcgctcaggagctgggcctggcccccgatatgttcttctgnnnnnnnnnnnnnnnnnnnnnnnnnnnnnnnnnnnnnnnnnggagcggctttgggcagcgggaaggcacctnccacttccggatgaccattctgccccccttggagaaactgcggctgctgctggagaagctgagcaggttccatgccaagttcaccctcgagtactcctgagcaccccagctggggccaggctgggtcgccctggactgtgtgctcaggagccctgggaggctctggagcccactgtacttgctcttgatgcctggcggggtggggtggggggggtgctgggcccctgcctctctgcaggtccctaataa

SEQ ID NO: 4438 - DNA, 569 bp, Homo sapiens
  misc_feature (161)..(185): n includes a, c, g, or t, or contains no nucleotide
  misc_feature (187)..(195): n includes a, c, g, or t, or contains no nucleotide
  misc_feature (197)..(208): n includes a, c, g, or t, or contains no nucleotide
  misc_feature (210)..(213): n includes a, c, g, or t, or contains no nucleotide
  misc_feature (216)..(217): n includes a, c, g, or t, or contains no nucleotide
  misc_feature (220)..(220): n includes a, c, g, or t, or contains no nucleotide
  misc_feature (222)..(228): n includes a, c, g, or t, or contains no nucleotide
  misc_feature (230)..(233): n includes a, c, g, or t, or contains no nucleotide
  misc_feature (235)..(235): n includes a, c, g, or t, or contains no nucleotide
  misc_feature (239)..(239): n includes a, c, g, or t, or contains no nucleotide
  misc_feature (241)..(241): n includes a, c, g, or t, or contains no nucleotide
  misc_feature (243)..(243): n includes a, c, g, or t, or contains no nucleotide
  misc_feature (247)..(247): n includes a, c, g, or t, or contains no nucleotide
  misc_feature (250)..(250): n includes a, c, g, or t, or contains no nucleotide
  misc_feature (254)..(254): n includes a, c, g, or t, or contains no nucleotide
  misc_feature (282)..(282): n includes a, c, g, or t, or contains no nucleotide
  misc_feature (365)..(365): n includes a, c, g, or t, or contains no nucleotide
  misc_feature (382)..(382): n includes a, c, g, or t, or contains no nucleotide
ccaggagacgattcgtaccgccctggccatgggtgcagaccgaggtatccacgtggaggtgcccccagcagaagcagaacgcttgggtcccctgcaggtggctcgggtcctggccaagctggcagagaaggagaaggtggacctggtgctgctgggcaaannnnnnnnnnnnnnnnnnnnnnnnnannnnnnnnngnnnnnnnnnnnntnnnnttnntgncnnnnnnnannnnanattngncntccnagntgangctggagggggacaagttgaaagtggancgggagatcgatgggggcctggagaccctgcgcctgaagctgccagctgtggtgacagctgacctgaggctcaacgagccccnctacgccacgctgcccnaacatcatgaaagccaagaagaagaagatcgaggtgatcaagcctggggacctgggtgtggacctgacctccaagctctctgtgatcagtgtggaggacccgccccagcgcacggccggcgtcaaggtggagaccactgaggacctggtggccaagctgaaggagattgggcggatttgagcccctc

SEQ ID NO: 4439 - DNA, 495 bp, Homo sapiens
  misc_feature (212)..(212): n includes a, c, g, or t, or contains no nucleotide
  misc_feature (307)..(325): n includes a, c, g, or t, or contains no nucleotide
  misc_feature (407)..(407): n includes a, c, g, or t, or contains no nucleotide
  misc_feature (464)..(470): n includes a, c, g, or t, or contains no nucleotide
tccctcactctcaggaaatgctgacccatgggcaggagactgtggagactgctcctgagcccccagcttccagcaggagggacagtctcaccatttccccagggcacgtggttgagtggggggaacgcccacttccctgggttagactgccagctcttcctagctggagaggagccctgcctctccgcccctgagcccactgtgcgtggggntcccgcctccaacccctcgcccagtcccagcagccagccaaacacacagaaggggactgccacctccccttgccagctgctgagccgcagagaannnnnnnnnnnnnnnnnnnacaggggttccttctgggcattacatcgcatagaaatcaataatttgtggtgatttggatctgtgttttaatgagtttcacngtgtgattttgattattaattgtgcaagcttttcctaataaacgtggagaatcacannnnnnnctgggcactgctctcaccttggttc

SEQ ID NO: 4440 - DNA, 444 bp, Homo sapiens
  misc_feature (327)..(342): n includes a, c, g, or t, or contains no nucleotide
  misc_feature (362)..(381): n includes a, c, g, or t, or contains no nucleotide
actggaggaacctccacttgttttggctgctgcaaatgtggtgagaaatatcagctataaatatcgagaggacttgtctgcacatctcatggtagctggctgggaccaacgtgaaggaggtcaggtatatggaaccctgggaggaatgctgactcgacagccttttgccattggtggctccggcagcacctttatctatggttatgtggatgcagcatataagccaggcatgtctcccgaggagtgcaggcgcttcaccacagacgctattgctctggccatgagccgggatggctcaagcgggggtgtcatctacctggtcactannnnnnnnnnnnnnnnggaccatcgagtcatcttgnnnnnnnnnnnnnnnnnnnnctatgatgagtgaaccttccccagacttctctttcttattttgtaataaactctctagggcca

SEQ ID NO: 4441 - DNA, 578 bp, Homo sapiens
  misc_feature (155)..(183): n includes a, c, g, or t, or contains no nucleotide
  misc_feature (360)..(395): n includes a, c, g, or t, or contains no nucleotide
ggaagacattttctaccctagatccaattgcatttatttatcaataagtgccattaaattgaaattatattacattttacactttctcaatgaatgaacaaattagtctgtagaatctagccacctgtttagcctagtcatgtgccttgaacatnnnnnnnnnnnnnnnnnnnnnnnnnnnnncctgttcttctatccaaacctttcaattcatgctacctgattcatttatttgacatagatcttaggcccacttgaactcttttcttgtttatctagcatagcacaaacgtttttccagtcttctttatcaacactaatgcctcttaattgcatcagtatttcctattggaaaatacnnnnnnnnnnnnnnnnnnnnnnnnnnnnnnnnnnnntttccaaatgtttttaatccaaagaaaaaggtttaaagcttatttccctttcttatacacacctgaataaaattgatgtgcatgttttagggatcaattacctaactgttccttggtctatttatgtataagaatgctttttaaagcacatgtctcattttaaatgacgcacaaactgaagat

SEQ ID NO: 4442 - DNA, 456 bp, Homo sapiens
  misc_feature (43)..(43): n includes a, c, g, or t, or contains no nucleotide
  misc_feature (66)..(66): n includes a, c, g, or t, or contains no nucleotide
  misc_feature (131)..(131): n includes a, c, g, or t, or contains no nucleotide
  misc_feature (170)..(170): n includes a, c, g, or t, or contains no nucleotide
  misc_feature (184)..(184): n includes a, c, g, or t, or contains no nucleotide
  misc_feature (299)..(299): n includes a, c, g, or t, or contains no nucleotide
gaccctgcttctctggcttggctgactgaggaggagccagaanccagcagaggtcacaagcacctncccagagccctcactctccagattccagtcagagctccctggctcaggaggaagaggaggaaganccaagggagaaccaggaaacggaaacagagtggtcattnccccagcccgggcntggaaagcagcgcatgaaggagaaagaacaggagaatgaaaggaaagtggcacagctagctgaagagaatgaacggctcaagcaggaaatcgagcgcctgaccagggaagtagangcgactcgccgagctctgattgaccgaatggtgaatctgcaccaagcatgaacaattgggagcatcagtcccccacttgggccacactacccacctttcccagaagtggctactgactaccctctcactagtgccaatgatgtgaccctcaatccca

SEQ ID NO: 4443 - DNA, 447 bp, Homo sapiens
  misc_feature (34)..(34): n includes a, c, g, or t, or contains no nucleotide
  misc_feature (89)..(89): n includes a, c, g, or t, or contains no nucleotide
  misc_feature (173)..(187): n includes a, c, g, or t, or contains no nucleotide
  misc_feature (357)..(395): n includes a, c, g, or t, or contains no nucleotide
  misc_feature (399)..(415): n includes a, c, g, or t, or contains no nucleotide
cagatacctcggattgaggatggtaacaattttnggagtggctgtccaggagaaggtgtttgagctgatgaccagcctccacaccaagnctagaaggcttccacactcaaatctctaagtatttctctgagcgtggtgatgcagtgactaaagcagccaagcagccccatgtnnnnnnnnnnnnnnngctggtgcacgagctggatgaggcagagtaccgggacatccggctgatggtcatggagatccgcaatgcttatgctgtgttatatgacatcatcctgaagaacttcgagaagctcaagaagcccaggggagaaacaaagggaatgatctattgagagccctctctcccannnnnnnnnnnnnnnnnnnnnnnnnnnnnnnnnnnnnnntggnnnnnnnnnnnnnnnnncaaacttgcttctgttgagatttttccctcac

SEQ ID NO: 4444 - DNA, 444 bp, Homo sapiens
  misc_feature (98)..(125): n includes a, c, g, or t, or contains no nucleotide
  misc_feature (160)..(179): n includes a, c, g, or t, or contains no nucleotide
  misc_feature (204)..(206): n includes a, c, g, or t, or contains no nucleotide
  misc_feature (211)..(259): n includes a, c, g, or t, or contains no nucleotide
  misc_feature (370)..(393): n includes a, c, g, or t, or contains no nucleotide
  misc_feature (395)..(414): n includes a, c, g, or t, or contains no nucleotide
cttcgagggtcaggttggacaagctgcatactctgcttccaaggggggaatagtgggcatgacactgcccattgctcgggatctggctcccataggtnnnnnnnnnnnnnnnnnnnnnnnnnnnntgtttggcaccccactgctgaccagcctcccagannnnnnnnnnnnnnnnnnnngccagccaagtgcccttccctagcnnncgacnnnnnnnnnnnnnnnnnnnnnnnnnnnnnnnnnnnnnnnnnnnnnnnnncccattcctcaatggagaggtcatccggctggatggggccattcgtatgcagccttgaagggagaaggcagagaaaacacacgctcctctgcccttcctttccctggggtnnnnnnnnnnnnnnnnnnnnnnnncnnnnnnnnnnnnnnnnnnnngcctaccagtcgccctctgtgcctaataaa

SEQ ID NO: 4445 - DNA, 93 bp, Homo sapiens
  misc_feature (39)..(39): n includes a, c, g, or t, or contains no nucleotide
  misc_feature (44)..(45): n includes a, c, g, or t, or contains no nucleotide
cagcttggatggagactccatgagaagccgtgggtgganccagnngcctcctccacaccagcgctgatgcccaataaagatgcccactgagga

SEQ ID NO: 4446 - DNA, 432 bp, Homo sapiens
  misc_feature (166)..(166): n includes a, c, g, or t, or contains no nucleotide
  misc_feature (270)..(284): n includes a, c, g, or t, or contains no nucleotide
ggccatcggtgctcggaacttgctcaaatctatagcaaagcagagagaagctcaacagcagcaacttcaagccctaatagcagaaaagaaaatgcagctagaaaggtatcgggttgaatatgaagctttgtgtaaagtagaagcagaacaaaatgaatttattganccaatttatttttcagaaatgaactgaaaatttcgcttttatagtaggaaggcaaaacaaaaaaaagcctctcaaaaccaaaaaaacctctgtagcattccagnnnnnnnnnnnnnnncctatgtcacaagaggtggcgtgtaaggaatgcagccccctgaagacagcactacaagtctgggggagccagttttaacatcagtgcacagctgctgctggtggccctgcagtgtacgttctcacctcttatgcttagttggaactaa

SEQ ID NO: 4447 - DNA, 620 bp, Homo sapiens
  misc_feature (250)..(250): n includes a, c, g, or t, or contains no nucleotide
  misc_feature (253)..(253): n includes a, c, g, or t, or contains no nucleotide
  misc_feature (256)..(256): n includes a, c, g, or t, or contains no nucleotide
  misc_feature (260)..(260): n includes a, c, g, or t, or contains no nucleotide
  misc_feature (262)..(262): n includes a, c, g, or t, or contains no nucleotide
  misc_feature (292)..(293): n includes a, c, g, or t, or contains no nucleotide
  misc_feature (295)..(337): n includes a, c, g, or t, or contains no nucleotide
  misc_feature (340)..(342): n includes a, c, g, or t, or contains no nucleotide
  misc_feature (345)..(366): n includes a, c, g, or t, or contains no nucleotide
  misc_feature (368)..(371): n includes a, c, g, or t, or contains no nucleotide
  misc_feature (373)..(423): n includes a, c, g, or t, or contains no nucleotide
  misc_feature (425)..(429): n includes a, c, g, or t, or contains no nucleotide
  misc_feature (432)..(437): n includes a, c, g, or t, or contains no nucleotide
  misc_feature (439)..(439): n includes a, c, g, or t, or contains no nucleotide
  misc_feature (441)..(443): n includes a, c, g, or t, or contains no nucleotide
  misc_feature (445)..(452): n includes a, c, g, or t, or contains no nucleotide
  misc_feature (454)..(456): n includes a, c, g, or t, or contains no nucleotide
tacggtcatcttgaatgatccctttgaaattttttttttgtttgtttgtttaaatcaagcctgaggctggtgaacagtagctacacacccatattgtgtgttctgtgaatgctagctctcttgaatttggatattggttattttttatagagtgtaaaccaagttttatattctgcaatgcgaacaggtacctatctgtttctaaataaaactgtttacattcaaaaaaaaaaaaaaaaaaaaaaaaaanaanaanaaananaactctaggcttaagaattatggatgctcnnannnnnnnnnnnnnnnnnnnnnnnnnnnnnnnnnnnnnnnnnnncannnggnnnnnnnnnnnnnnnnnnnnnntnnnntnnnnnnnnnnnnnnnnnnnnnnnnnnnnnnnnnnnnnnnnnnnnnnnnnnncnnnnntcnnnnnnangnnntnnnnnnnntnnntgttggtaattttgaaagagaacagagagcaagttctgttggcacccaatcatgtcattgaaagtgcctttaacgaaagaaatggtcactgaatggaattctcttaagaaaccctgagattaaaaaaagactatttggataacttataggaaagcctagaacct

SEQ ID NO: 4448 - DNA, 530 bp, Homo sapiens
  misc_feature (26)..(40): n includes a, c, g, or t, or contains no nucleotide
  misc_feature (368)..(368): n includes a, c, g, or t, or contains no nucleotide
tgtatagccaggtcctgtttcaagannnnnnnnnnnnnnngggtcaggtggtgtctcgagaaggccaaggaaggcaggagactctattccgatgtataagaagtatgccctcccacccggaccgggcctacaacagctgctatagcgcaggtgtcttccatttacaccaaggggatattctgagtgtcataattccccgggcaagggcgaaacttaacctctctccacatggaaccttcctggggtttgtgaaactgtgattgtgttataaaaagtggctcccagcttggaagaccagggtgggtacatactggagacagccaagagctgagtatataaaggagagggaatgtgcaggaacagaggcntcttcctgggtttggctccccgttcctcacttttcccttttcattcccaccccctagactttgattttacggatatcttgcttctgttccccatggagctccgaattcttgcgtgtgtgtagatgaggggcgggggacgggcgccaggcattgtccagacct

SEQ ID NO: 4449 - DNA, 574 bp, Homo sapiens
  misc_feature (114)..(114): n includes a, c, g, or t, or contains no nucleotide
  misc_feature (158)..(158): n includes a, c, g, or t, or contains no nucleotide
  misc_feature (251)..(251): n includes a, c, g, or t, or contains no nucleotide
  misc_feature (284)..(304): n includes a, c, g, or t, or contains no nucleotide
acagcttatttatcgagtccgacgtactgacgatacacctgtggttcttgtgggaaacaagtcagacctcaaacagctaagacaggtcaccaaggaagaaggattggccttggnccgagaattcagctgtcccttttttgagacatctgctgcatacngctactatattgatgatgttttccatgcccttgtacgggagatacgtaggaaagaaaaggaggcagtactggccatggagaaaaaatctaagncccaaaaacagtgtatggaagaggctaaaatcnnnnnnnnnnnnnnnnnnnnnattcagtaacttgaagagaagatgtgaagtgtttatctgtgaactgcagtgctgtatcaaagcagtccagtaacctgcagtactgagtatggtgcttgctctttcacttaactgataagagggacatgcctactaggagtttttaatgatgtggtatttaaagtattgtctcttagttaagtatgatttattaacccagtggagcactgtctgcttttaaattgtcacattagaatttgttctaccaatgttttgggttctgttgcgcta

SEQ ID NO: 4450 - DNA, 516 bp, Homo sapiens
  misc_feature (298)..(312): n includes a, c, g, or t, or contains no nucleotide
agcacaactggaatagctaattacagtctattaaaactgtgaatgtatgtagcaatcctgcgtgtgaaggcaaataaactctttaacaggcaattatattgctggccaaaatatgctatatttgtatacaaagacattctaactcagttccagtatgaagaaagattattcactctagctccactgagaaacattttcctaagtgaaaacaatttcttaagatggaaatggattggattgtcaaattattatttattggagaaaaaaacctgatctacacatttttacttatatgggnnnnnnnnnnnnnnngggttctagatgattttggtggcatgcttgctgagccataattactaaagagaatgtaagtggacgggttccctgaatccccggggtccttggagagccatcgaggagaatgtgcaattggactgaagctccctggctgaagatacatgccgagtcagcacatgggtagagatgatgtaaaagcagccaatctggaaacaatac

SEQ ID NO: 4451 - DNA, 444 bp, Homo sapiens
  misc_feature (40)..(57): n includes a, c, g, or t, or contains no nucleotide
  misc_feature (67)..(343): n includes a, c, g, or t, or contains no nucleotide
  misc_feature (408)..(408): n includes a, c, g, or t, or contains no nucleotide
ccttcttggtggttcaagagcaaagacgctttccccctannnnnnnnnnnnnnnnnnaaagagtttnnnnnnnnnnnnnnnnnnnnnnnnnnnnnnnnnnnnnnnnnnnnnnnnnnnnnnnnnnnnnnnnnnnnnnnnnnnnnnnnnnnnnnnnnnnnnnnnnnnnnnnnnnnnnnnnnnnnnnnnnnnnnnnnnnnnnnnnnnnnnnnnnnnnnnnnnnnnnnnnnnnnnnnnnnnnnnnnnnnnnnnnnnnnnnnnnnnnnnnnnnnnnnnnnnnnnnnnnnnnnnnnnnnnnnnnnnnnnnnnnnnnnnnnnnnnnnnnnnnnnnnnnnnnnnnnnnnnntggagatgttacatctggtagatgtaacattctaccagattatggatggactgatctgaaaatcnacctcaactcaagggtggtcagctcaatgctacaca

SEQ ID NO: 4452 - DNA, 318 bp, Homo sapiens
  misc_feature (170)..(184): n includes a, c, g, or t, or contains no nucleotide
ctccaagaaggcagtgacaaaggcccagaagaaggacggcaagaagcgcaagcgcagccgcaaggagagctactccgtgtacgtgtacaaggtgctgaagcaggtccaccccgacaccggtatctcgtccaaggccatgggcatcatgaactccttcgtcaatgacatcnnnnnnnnnnnnnnnggcgaggcttcccgcctggcgcattacaacaagcgctcgaccatcacctccagggagatccagacggccgtgcgcctgctgctgccaggggagctggccaagcacgcggtgtcggagggcaccaaggccgtcac

SEQ ID NO: 4453 - DNA, 523 bp, Homo sapiens
  misc_feature (51)..(51): n includes a, c, g, or t, or contains no nucleotide
  misc_feature (53)..(53): n includes a, c, g, or t, or contains no nucleotide
  misc_feature (153)..(153): n includes a, c, g, or t, or contains no nucleotide
  misc_feature (170)..(170): n includes a, c, g, or t, or contains no nucleotide
  misc_feature (235)..(235): n includes a, c, g, or t, or contains no nucleotide
  misc_feature (268)..(269): n includes a, c, g, or t, or contains no nucleotide
  misc_feature (277)..(277): n includes a, c, g, or t, or contains no nucleotide
cacggccagtgtcacgtacagcatctgtggttccagtctgtgcttgacatncnccgccacttccacacacaccccatcccactggagtcagggggctcggccgacatcacccttcgcagctatgtgcgggcccaggaccccccaccagagccnggccccacgccccctgncgcgcccgcgtccccggcctgctggagcgactcgcccggccagcactacttctccagcctcgccncggccgcctgcccgcctgcctcgccctccgacnnccgccggngcctcctcgtcttccgcctcgtcgtcctctgccgcgtcggggcccgcccccccgcgccccgtcgagggccagctcagcgcgcggagccgcagcaacagcgccgagcgcctgctggaggccgtggccgccaccgccgccgaggagcccccggaggccgcgcccggccgcgcgcgcgccgtggagaaccagtactccttctactagcccgcggcgccgcccgggtgggacacgccaagctcttcagtg

SEQ ID NO: 4454 - DNA, 582 bp, Homo sapiens
  misc_feature (147)..(147): n includes a, c, g, or t, or contains no nucleotide
  misc_feature (231)..(231): n includes a, c, g, or t, or contains no nucleotide
  misc_feature (382)..(382): n includes a, c, g, or t, or contains no nucleotide
  misc_feature (424)..(445): n includes a, c, g, or t, or contains no nucleotide
acattggacctttcctgaggaagagggactgttcttttgtcccagaaaagcagtggctccattggtgttgacatacatccaacattaaaagccacccccaaatgcccaagaaaaaaagaaagacttatcaacatttgttccatgagnagaaaactggagctctggcctcagtgttacagctaaataatctttaattaaggcaagtcactttcttcttcttaaagctgtttnctagtttgagaaatgatgggattttagcagccagtcttgaaggtctctttcagtatcaacattctaagatgctgggacttactgtgtcatcaaatgtgcggttaagattctctgggatattgatactgtttgtgtttttagttgggagatntgagagacctggctttggcaagagcagatgtcattccatatnnnnnnnnnnnnnnnnnnnnnnattctatcctctctccaaacccgttttccaacatttgttaatagttacgtctctcctgatgtagcacttaagcttcatttagttattatttctttcttcactttgcacacatttgcatccacatattagggaaggaa

SEQ ID NO: 4455 - DNA, 574 bp, Homo sapiens
  misc_feature (63)..(211): n includes a, c, g, or t, or contains no nucleotide
  misc_feature (300)..(350): n includes a, c, g, or t, or contains no nucleotide
  misc_feature (404)..(418): n includes a, c, g, or t, or contains no nucleotide
  misc_feature (527)..(547): n includes a, c, g, or t, or contains no nucleotide
acacgcaccgggacaggcctcagaacgtggacatctcaagacctccagaggaagcccttgtcnnnnnnnnnnnnnnnnnnnnnnnnnnnnnnnnnnnnnnnnnnnnnnnnnnnnnnnnnnnnnnnnnnnnnnnnnnnnnnnnnnnnnnnnnnnnnnnnnnnnnnnnnnnnnnnnnnnnnnnnnnnnnnnnnnnnnnnnnnnnnnnnnnnnngaacccagagcccccaccccagccacctggctctttgttgacagtcggcgacaaggttgtgcgtggctcctgacctgctgctaagagtnnnnnnnnnnnnnnnnnnnnnnnnnnnnnnnnnnnnnnnnnnnnnnnnnnngtttcttccggcgcagctcttaggtgttcactctcgccagctcagttggctttnnnnnnnnnnnnnnnctacaatgtgaaaggaaagtgcttgctgtgatgttcctactgtggcccagctgcccagcatggacctggtgactctccacagggcctctaccatcctctctgtggccannnnnnnnnnnnnnnnnnnnntcttcatggggccctgagcttctgctg

SEQ ID NO: 4456 - DNA, 415 bp, Homo sapiens
taacctgtcagcaaggccttatgtgtacgacctcattgccgtgtccaatcattatggagccatgggggttggccactacactgcatatgcgaagaacaaactgaatggtaaatggtattactttgatgatagcaacgtgtccctggcctctgaggatcagatagtgactaaagcagcttatgtgctattttaccaacgtcgagatgatgaattttataagacaccttcacttagcagttctggttcctctgatggagggacacgaccaagcagctctcagcagggctttggggatgatgaggcttgcagcatggacaccaactaatgctgactccacgatcctgccaccctgtagcgccagtgtaatcccccaggagaacatctttgacactctgcagactgctagtgttctgtc

SEQ ID NO: 4457 - DNA, 505 bp, Homo sapiens
catgtcatcagcgtggacccttcagaccagaagaagacagcgtgctatgacattgacgtggaggtggaggagccattaaaggggcagatgagcagcttcctcctatccacggccaaccagcaggagatcagtcctctggacagtaagatccatgagacgattgagtccataaaccagctcaagatccagagggacttcatgctaagcttctccagagaccccaaaggctatgtccaagacctgctccgctcccagagccgggacctcaaggtgatgacagatgtagccggcaaccctgaagaggagcgccgggctgagttctaccaccagccctggtcccaggaggccgtcagtcgctacttctactgcaagatccagcagcgcaggcaggagctggagcagtcgctggttgtgcgcaacacctaggagcccaaaaacaagcagcacgacggaactttcagccgtgtcccgggccccagcattttgccccgggctccagctcact

SEQ ID NO: 4458 - DNA, 603 bp, Homo sapiens
  misc_feature (193)..(418): n includes a, c, g, or t, or contains no nucleotide
  misc_feature (558)..(558): n includes a, c, g, or t, or contains no nucleotide
  misc_feature (560)..(562): n includes a, c, g, or t, or contains no nucleotide
taaggcttttagtcccaccgacattagccaggctcgtagtgaggcctccagagcaggttgtgctgtcccctgcctctggaagcaatggggaatttggaatcttgtgtaagtgcccaaataagtctgagtgctttcctcttcttcaacactcaaccctcaatcccttagcactgattgattagagaggtccccnnnnnnnnnnnnnnnnnnnnnnnnnnnnnnnnnnnnnnnnnnnnnnnnnnnnnnnnnnnnnnnnnnnnnnnnnnnnnnnnnnnnnnnnnnnnnnnnnnnnnnnnnnnnnnnnnnnnnnnnnnnnnnnnnnnnnnnnnnnnnnnnnnnnnnnnnnnnnnnnnnnnnnnnnnnnnnnnnnnnnnnnnnnnnnnnnnnnnnnnnnnnnnnnnnnnnnnnnnnnnnnnnnattagaatattttcatactgctcttcctcaattaatttttgttgttaatgttgatgtcttcattggatgggtcataatgttccatgaaacctctcaagtacacaattgtatgttctttgtatcccttaccacaaatatcncnnntctgctcatttcttttgcagcttcctataaagtttgtcttc

SEQ ID NO: 4459 - DNA, 518 bp, Homo sapiens
gatctgtgtggatggcaaactccccaggccattctgggacctaagtttaagaagtgccgtcctcgaactttctgactctaagctcctgagcgggagtcagacttagccctgagcctgcacttcctgttcaggtgcagacactgaacagggtctcaaacaccttcagcatgtgtgttgtgtgctcacgtgccacacagtgtctcatgcacacaacccagtgtacacaccacctacgtgcacacagcatccttccacactgtgtatgtgaacagcttgggccctgcaaacacaaccatctacacacatctacacccccaagcacacacacatggtccgtgccatgtcacctccatagggaaaggcttctctccaagtgtgccaggccaggacagccctcccagccatgaatccttactcagctacctcgggttggggtgggagccccagccaaatcctgggctccctgcctgtggctcagccccagctcccaaggcctgcctggctctgtctgaacagaa

SEQ ID NO: 4460 - DNA, 544 bp, Homo sapiens
  misc_feature (26)..(26): n includes a, c, g, or t, or contains no nucleotide
  misc_feature (94)..(110): n includes a, c, g, or t, or contains no nucleotide
  misc_feature (238)..(238): n includes a, c, g, or t, or contains no nucleotide
  misc_feature (241)..(252): n includes a, c, g, or t, or contains no nucleotide
  misc_feature (269)..(381): n includes a, c, g, or t, or contains no nucleotide
  misc_feature (445)..(460): n includes a, c, g, or t, or contains no nucleotide
acctgtgcacatcttgctggtggagncatggcccactgtgcaggaccccaccctcgggggctttcggctcccacactgatgattctccccagcnnnnnnnnnnnnnnnnncgctacgtactcaggcccccagctctcgtgtcctggaggaagagctagctccagacatgggttgatcacctagaggagctctggctaaggcacagttttctagaaataaaacatttattcggtttttnaannnnnnnnnnnnaggccccttggattccnnnnnnnnnnnnnnnnnnnnnnnnnnnnnnnnnnnnnnnnnnnnnnnnnnnnnnnnnnnnnnnnnnnnnnnnnnnnnnnnnnnnnnnnnnnnnnnnnnnnnnnnnnnnnnnnncccgaagcttagcctgtaggtgccaagccagtccctactcttggctgcggccacgtgaggtccnnnnnnnnnnnnnnnngcgagcactagtggacaaagccagcaaatgcggcgttcctgtgagcagataccctcaaccagccagctgtcaaaagtatttcaa

SEQ ID NO: 4461 - DNA, 400 bp, Homo sapiens
  misc_feature (26)..(26): n includes a, c, g, or t, or contains no nucleotide
atttgttcctccttgacaaaagtagnctctgtgtggataatatgattttattactacagttccagtcacttggttatatttatcttagcatgagcctttcacaccaagatttctatattttgtaacataggtgaaatatttaaaacatcaaaaactgtaaatctagatttttaaaaaatccaactgcaatgtcttttcctttgattgagatgatttgtgtaaactcaccagtcttgctttggagtgagcagaagagaatgactattttacgtggagcatcattgtgtgactgttgacctggacagtcccaagggctatgcagatggactccattggcacagggaggtttgacctcttccctgctattatccctcctcccaactgtacagatttgtttgtt

SEQ ID NO: 4462 - DNA, 451 bp, Homo sapiens
atctattttgatgcagcatttgataatgataaaacacctcacacctcactctttatagtgcacaaaatgaatgaggtctgggctaggtagaaaaagggtcaatgctatttttgtttttagaatcattaccttttaccagcttttaaccatctgatatctatagtagacacactatcatagttaacatagttaagttcagcacttgtctcattttaatgtaaagatttgcttccattttcctacaggcagtctctctcttcctcacagtcccactgtgcaggtgctattgttactcttacgaatattttcagtaatgttattttcttctaagtgaaatttctagcctgcactttgatgtcatgtgttccctttgtctttcaaactccaaggttcccctgtggccctctcccttaccctgggaaggcctcttggagaccttacccctggctgt

SEQ ID NO: 4463 - DNA, 344 bp, Homo sapiens
ccccgggctgctgttcctggggttgctgctcctgccacttgtggtcgccttcgccagcgctgaagctgaagaagatggggacctgcagtgcctgtgtgtgaagaccacctcccaggtccgtcccaggcacatcaccagcctggaggtgatcaaggccggaccccactgccccactgcccaactgatagccacgctgaagaatggaaggaaaatttgcttggacctgcaagccccgctgtacaagaaaataattaagaaacttttggagagttagctactagctgcctacgtgtgtgcatttgctatatagcatacttcttttttccagtttcaatctaactgtg

SEQ ID NO: 4464 - DNA, 527 bp, Homo sapiens
  misc_feature (35)..(102): n includes a, c, g, or t, or contains no nucleotide
  misc_feature (123)..(123): n includes a, c, g, or t, or contains no nucleotide
  misc_feature (267)..(267): n includes a, c, g, or t, or contains no nucleotide
  misc_feature (270)..(287): n includes a, c, g, or t, or contains no nucleotide
  misc_feature (295)..(295): n includes a, c, g, or t, or contains no nucleotide
  misc_feature (298)..(298): n includes a, c, g, or t, or contains no nucleotide
  misc_feature (306)..(306): n includes a, c, g, or t, or contains no nucleotide
  misc_feature (313)..(313): n includes a, c, g, or t, or contains no nucleotide
  misc_feature (315)..(338): n includes a, c, g, or t, or contains no nucleotide
  misc_feature (430)..(445): n includes a, c, g, or t, or contains no nucleotide
atgacacaaaactatgagagtgacaaaatggtgannnnnnnnnnnnnnnnnnnnnnnnnnnnnnnnnnnnnnnnnnnnnnnnnnnnnnnnnnnnnnnnnnnntgtagtgtaactattttgtancaatagaggactgtaactactatttaggttgtacagattgaaatttagttgtttcattggctgtctgaggaggtgtggacttttatatatagatctacataaaaactgctacatgacaaaaaccacacctaaagaaattttaangannnnnnnnnnnnnnnnnntcactttngtngtaatctngaaatcntnnnnnnnnnnnnnnnnnnnnnnnnaatccttgttcactgaagtctttcaattgagctggttgaatactttgaaaaatgctcagttctaactaatgaaatggatttcccagtagggnnnnnnnnnnnnnnnntgtatagtagttatatgcatatgtttctgtgcatgttctctacacaattgtaaggtgtcactgtatttaactgttgcacttg

SEQ ID NO: 4465 - DNA, 517 bp, Homo sapiens
tgtaattgtccttgtacaaaatgctcatatttaattatgaactgctttaaatcactatcaaagttacaagaaatgtttggcttattgtgtgatgcaacagatatatagccctttcaagtcatgttgtgtttggacttggggttggaacagggagagcagcagccatgtcagctacacgctcaaatgtgcagatgattatggaaaataacctcaaaatcttacaaagctgaacatccaaggagttattgaaaactatcttaaatgttcttggtaggggagttggcattgttgataaagccagtcccttcatttaactgtctttcaggatgttccttcgttgtttccatgagtattgcaggtaataatacagtgtgttccataagaatctcaatcttggggctaaatgccttgtttctttgcacctcttttcaagtccttacatttaattactaattgataagcagcagcttcctacatatagtaggaaactgccacatttttgctatcatgattggct

SEQ ID NO: 4466 - DNA, 60 bp, Homo sapiens
cctgcagactaaaggttcgaacctctgacatgggtggctatgctacttgccatgacttca

SEQ ID NO: 4467 - DNA, 484 bp, Homo sapiens
  misc_feature (36)..(36): n includes a, c, g, or t, or contains no nucleotide
  misc_feature (284)..(304): n includes a, c, g, or t, or contains no nucleotide
  misc_feature (316)..(336): n includes a, c, g, or t, or contains no nucleotide
ggaaccacctatgcttaaaatactgtaaatatgcantgaggtttggcaaaatctattccatgtgtgatttgcttgtagaaacaattttgaaagccccttgaggaaaataaaaatcaagaagaacacttttctcccttttccatacaaattaaaacttaacagcatcaaattattgggaccagaaaccaagtaatgtataatgtggcttttgttgagttaaataagatgctatataatggagaagaatttgaaaatgcacaaaaaaatcaatctacattatcagnnnnnnnnnnnnnnnnnnnnntatgttaaatannnnnnnnnnnnnnnnnnnnnaactatgagggtcttgtatccacgtaacacaggtagttacaaaaacatgttattgtactgtgtaaagatgcatagtcatctcatttggttggctttgtaccttgtaccttttttagccttggcttttgttgaactagaaccctcagca

SEQ ID NO: 4468 - DNA, 202 bp, Homo sapiens
  misc_feature (141)..(155): n includes a, c, g, or t, or contains no nucleotide
tgaagccttagcaaaaatgcctcctcaccactccccaggagaatttttataaaaagcataatcactgattccttcactgacataatgtaggaagcctctgaggagaaaaacaaagggagaaacatagagaacggttgctannnnnnnnnnnnnnngatctttgtacaatattgctggccctggttcacctgtttactgttat

SEQ ID NO: 4469 - DNA, 489 bp, Homo sapiens
  misc_feature (122)..(122): n includes a, c, g, or t, or contains no nucleotide
  misc_feature (420)..(462): n includes a, c, g, or t, or contains no nucleotide
cattgcagctgtttgagtcccatgcagggcatcttggcccacagctcttcaacaagtttgcactgccttacatccgtgatgtggccaagcaagtgaaggccaggttgcgggaggcaggcctngcaccagtgcccatgatcatctttgctaaggatgggcattttgccctggaggagctggcccaagctggctatgaggtggttgggcttgactggacagtggccccaaagaaagcccgggagtgtgtggggaagacggtgacattgcagggcaacctggacccctgtgccttgtatgcatctgaggaggagatcgggcagttggtgaagcagatgctggatgactttggaccacatcgctacattgccaacctgggccatgggctttatcctgacatggacccagaacatgtgggcgccnnnnnnnnnnnnnnnnnnnnnnnnnnnnnnnnnnnnnnnnnnnactgagtgtatacctttaccctcaagt

SEQ ID NO: 4470 - DNA, 126 bp, Homo sapiens
gtgtctcctgcacctgcgctggttcctgcaagtgcaaagagtgcaaatgcacctcctgcaagaagagctgctgctcctgctgccccgtgggctgtagcaagtgtgcccagggctgtgtttgcaaag

SEQ ID NO: 4471 - DNA, 415 bp, Homo sapiens
  misc_feature (346)..(360): n includes a, c, g, or t, or contains no nucleotide
tcattccttctggaggacacacagtctcagtccagatgccttcctgtctttctggccctttctggaccagatcctactcttcctttctaaatctgagatctccctccagggaatccgcctgcagaggacagagctggctgtcttcccccacccctaacctggcttattcccaactgctctgcccactgtgaaaccactaggttctaggtcctggcttctagatctggaaccttaccacgttactgcatactgatccctttcccatgatccagaactgaggtcactgggttctagaacccccacatttacctcgaggctcttccatccccaaactgtgccctgcctnnnnnnnnnnnnnnngggagggcccctcatgtgtgctgtgctgtgtctgcaccgcttggtttgcagttga

SEQ ID NO: 4472 - DNA, 337 bp, Homo sapiens
  misc_feature (64)..(86): n includes a, c, g, or t, or contains no nucleotide
  misc_feature (214)..(243): n includes a, c, g, or t, or contains no nucleotide
ggaccctgaagacgaaattgcggtgctggcctttctggtggaggctggaacccaggtgaacgannnnnnnnnnnnnnnnnnnnnnncactgtctaatatccccaaacctgagatgagcactacgatggcagagagcagcctgttggacctgctccccaaggaggagaaactgaggcactacttccgctacctgggctcactcaccacaccgacnnnnnnnnnnnnnnnnnnnnnnnnnnnnnnccgggagcccattcagcttcacagagaacagatcctggcattctctcagaagctgtactacgacaaggaacagacagtgagcatgaaggacaat

SEQ ID NO: 4473 - DNA, 438 bp, Homo sapiens
  misc_feature (95)..(95): n includes a, c, g, or t, or contains no nucleotide
  misc_feature (182)..(182): n includes a, c, g, or t, or contains no nucleotide
  misc_feature (333)..(333): n includes a, c, g, or t, or contains no nucleotide
  misc_feature (374)..(374): n includes a, c, g, or t, or contains no nucleotide
  misc_feature (393)..(393): n includes a, c, g, or t, or contains no nucleotide
  misc_feature (395)..(397): n includes a, c, g, or t, or contains no nucleotide
tactgcacagacttcctgctgtgcgccagcagctctggtgctgtgcttcccgtgaggacccaggaccccttcctgccatacccaccaaggtcctncccacagggccaggctgcctctagcgccactactcgagaccctgcccagagggtggtgctggtgttgcgggaacgctggcatttctnccgggacggccgggtgctgctgggctcgagggccctgagggagcggcacctaggcctgatgggctaccagctcctgccgctacccttcgaggaactggagtcccagagaggcctgccccagctcaagagctacctgaggcagaagctccangccctgggcctgcgctgggggcctgaagggggctgaggggntgatgtggggttcaggatngnnnccccatggggggtggatgatttgcactttggttccctgtgt

SEQ ID NO: 4474 - DNA, 404 bp, Homo sapiens
  misc_feature (30)..(30): n includes a, c, g, or t, or contains no nucleotide
  misc_feature (288)..(288): n includes a, c, g, or t, or contains no nucleotide
  misc_feature (290)..(290): n includes a, c, g, or t, or contains no nucleotide
  misc_feature (298)..(298): n includes a, c, g, or t, or contains no nucleotide
  misc_feature (306)..(306): n includes a, c, g, or t, or contains no nucleotide
  misc_feature (308)..(309): n includes a, c, g, or t, or contains no nucleotide
  misc_feature (312)..(312): n includes a, c, g, or t, or contains no nucleotide
  misc_feature (314)..(317): n includes a, c, g, or t, or contains no nucleotide
  misc_feature (322)..(323): n includes a, c, g, or t, or contains no nucleotide
  misc_feature (372)..(372): n includes a, c, g, or t, or contains no nucleotide
tggcacacgagcaggcgccccgaagcgccnaccgcttcatcactgagaaggcggtcttctcccgctgggccaagaagaggcccatcgtgttcgcccatccgtcctggaggactgagtagcttccgtcgtcctgccagccgccatgccgttgcgaggcctccgggatgtcccatcccaagccatcacactccacaaaaacatttaatttatggatcctgcctcctgccacgtgctgggtggacctaaggttccttcccaccccattctggcgacacttggagccatctnanggcctcantgacttgnannggngnnnnggggnnagccgtgtctcccccctccactccctgagtaattcatggcatttggggnctcaccccacctccaggtctgtcaagtggcct

SEQ ID NO: 4475 - DNA, 258 bp, Homo sapiens
  misc_feature (187)..(210): n includes a, c, g, or t, or contains no nucleotide
gccagaaacctcatagttattcttgactccaggaagaaatattattgagtttttaaaaactcagcttattgactcattgttttatataataaaatgcaacagttttaagtgtatatttcaatgagttttaatacatttatgtacttgtgtcactatcctcatagatagagacaaaacatttctatcnnnnnnnnnnnnnnnnnnnnnnnncatcccaatcaatcctttcccctttgctggctccaaacaatgactctt

SEQ ID NO: 4476 - DNA, 313 bp, Homo sapiens
  misc_feature (284)..(284): n includes a, c, g, or t, or contains no nucleotide
ccgcctcattgagatgtaccgagacctcttccagcaggggacctgagggctgtcctcgctgctgagaagagccactaactcgtgacctccagcctgccccttgctgccgtgtgctcctgccttcctgatcctctgtagaaaggatttttatcttctgtagagctagccgccctgactgccttcagacctggccctgtagcttttctttttctccaggctgggccgtgagcaggtgggccgttgagttacctctgtgctggatcccgtgcccccacttgcctacnctctgtcctgccttgttattgtaagtgcc

SEQ ID NO: 4477 - DNA, 447 bp, Homo sapiens
  misc_feature (26)..(26): n includes a, c, g, or t, or contains no nucleotide
  misc_feature (43)..(43): n includes a, c, g, or t, or contains no nucleotide
  misc_feature (54)..(77): n includes a, c, g, or t, or contains no nucleotide
  misc_feature (80)..(81): n includes a, c, g, or t, or contains no nucleotide
  misc_feature (83)..(97): n includes a, c, g, or t, or contains no nucleotide
  misc_feature (99)..(99): n includes a, c, g, or t, or contains no nucleotide
  misc_feature (102)..(102): n includes a, c, g, or t, or contains no nucleotide
  misc_feature (153)..(153): n includes a, c, g, or t, or contains no nucleotide
  misc_feature (165)..(165): n includes a, c, g, or t, or contains no nucleotide
  misc_feature (174)..(174): n includes a, c, g, or t, or contains no nucleotide
  misc_feature (369)..(399): n includes a, c, g, or t, or contains no nucleotide
cagctttgacctggattcccgaattntaatccgacctcacctntgggggaattnnnnnnnnnnnnnnnnnnnnnnnnggnncnnnnnnnnnnnnnnncnagntcacctttcaaggacccagaagtagggttttggcctaggtaacggggcagnagatgtggttcngagattctnccccggactctccgtcatgggcgtgtgcttgttgattccaggactggctactgcgtacatccacaggttcactaacgggggcaaggaaaaaagggttgctcattttgggtatcactggagtctgatggaaagagataggcgcatctctggagttgatcgttactatgtgtcaaagggtttggagaacattgattnnnnnnnnnnnnnnnnnnnnnnnnnnnnnnntaactcagttatggccatctacccctgctagaaggttacagtgtatta

SEQ ID NO: 4478 - DNA, 584 bp, Homo sapiens
agcggggtcaccacctgcctgcgcttcccgggccagctgaacgccgacctgcgcaagctggccgtcaacatggtcccctttcctcgcctgcacttcttcatgcccgcgttcgcacccctgaccagccggggcagccagcagtaccggggcctgacggtgcccgagctcacccagcagatgttcgatgccaagaacatgatggcggcgtgcgacccgcgccacggccgctacctgaccgtggccgccgtgttccggggccgcatgtccatgaaggaggtggacgagcagatgctgagcgtgcagagcaagaacagcagctacttcgtggagtggatccccaacaacgtgaagacggccgtgtgcgacatcccgccccgcggcctgaagatggccgtgaccttcatcggcaacagcacggccatccaggagctgttcaagcgcatctccgagcagttcacggccatgttccggcgcaaggccttcttgcactggtacacgggcgagggcatggacgagatggagttcaccgaggccgagagcaacatgaatgacctggtatctgagtaccagcagtaccaggacgc

SEQ ID NO: 4479 - DNA, 519 bp, Homo sapiens
catcgccaacatccaactcaacaagagcaacatggcagccacagccgccttcaacaaggatgccctgctcaactggctgaagtccaagaacccgggggaggccctggatcgagccattgaggagttcaccctctcctgtgctggctattgtgtggccacatatgtgctgggcattggcgatcggcacagcgacaacatcatgatccgagagagtgggcagctgttccacattgattttggccactttctggggaatttcaagaccaagtttggaatcaaccgcgagcgtgtcccattcatcctcacctacgactttgtccatgtgattcagcaggggaagactaataatagtgagaaatttgaacggttccggggctactgtgaaagggcctacaccatcctgcggcgccacgggcttctcttcctccacctctttgccctgatgcgggcggcaggcctgcctgagctcagctgctccaaagacatccagtatctcaaggactccctggcactggggaa

SEQ ID NO: 4480 - DNA, 46 bp, Homo sapiens
agcttccccaactaaagcctagaagagcttctgaggcgctgctttg

SEQ ID NO: 4481 - DNA, 293 bp, Homo sapiens
  misc_feature (26)..(48): n includes a, c, g, or t, or contains no nucleotide
  misc_feature (175)..(176): n includes a, c, g, or t, or contains no nucleotide
  misc_feature (184)..(184): n includes a, c, g, or t, or contains no nucleotide
  misc_feature (190)..(191): n includes a, c, g, or t, or contains no nucleotide
  misc_feature (193)..(193): n includes a, c, g, or t, or contains no nucleotide
  misc_feature (196)..(196): n includes a, c, g, or t, or contains no nucleotide
  misc_feature (198)..(198): n includes a, c, g, or t, or contains no nucleotide
  misc_feature (208)..(208): n includes a, c, g, or t, or contains no nucleotide
ctcctggggagatcaaggttgatgannnnnnnnnnnnnnnnnnnnnnngagcagagatgaagacttccatggagtcactgattcatcactttaagttgtatactgagggctaccaagttcctccaggagccacatatactgccattgaggctcccaagggagagtttggggtgtnnctggtgtntgatgnnancancngcccttatcnatgcaagatcaaggctcctggttttgcccatctggctggtttggacaagatgtctaagggacacatgttggcagatgtcgttgcc

SEQ ID NO: 4482 - DNA, 174 bp, Homo sapiens
ctgccagaggagaccgtggacttcatggttcagcacacgtcgttcaaggagatgaagaagaaccctatgaccaactacaccaccgtcccccaggagttcatggaccacagcatctcccccttcatgaggaaaggcatggctggggactggaagaccaccttcaccgtggcgcag

SEQ ID NO: 4483 - DNA, 428 bp, Homo sapiens
  misc_feature (31)..(31): n includes a, c, g, or t, or contains no nucleotide
  misc_feature (148)..(212): n includes a, c, g, or t, or contains no nucleotide
  misc_feature (308)..(323): n includes a, c, g, or t, or contains no nucleotide
  misc_feature (402)..(403): n includes a, c, g, or t, or contains no nucleotide
tgagactagcaattagttggctgctccctanccatgattttacttttaatagcaatacagttatattggtgataaatatgacaggcttaagtactgctgtccttttgcatcttcctaagcatcttggttaaatttctgaagtttaaannnnnnnnnnnnnnnnnnnnnnnnnnnnnnnnnnnnnnnnnnnnnnnnnnnnnnnnnnnnnnnnntctattaggtccattggcaaagtatattggtccatattcaaacctattccaaaaggttagaagtgtttaagattcctttattgtggtaccatgtcnnnnnnnnnnnnnnnntgagcaacaataaattactagtttaccttctggaattttaattgttataaccgaatcaattattggaaagtgaaaaacnnctcccggtcacacaacagggtacgt

SEQ ID NO: 4484 - DNA, 459 bp, Homo sapiens
  misc_feature (37)..(38): n includes a, c, g, or t, or contains no nucleotide
  misc_feature (139)..(166): n includes a, c, g, or t, or contains no nucleotide
  misc_feature (229)..(229): n includes a, c, g, or t, or contains no nucleotide
agaccgccttgtaccggaaaatgctgggcaaccccannccggctgcctgctaagtgccctggcaagggtgcctggtccatcccatggaagtggctgtttggggcgactgctgttgccttggggggtgtggcactctctnnnnnnnnnnnnnnnnnnnnnnnnnnnnctaggtggctgccaccccctctgcacaccatggaccctgccctgcgctccccaactcccccanggctccctgtccactgccctccctggtctggccccctcctccgggttaggggagcaaggattgggggtcgtgcagcccagccagcaggagggactgaggccctctaggaggaaagcccagagggagggggccctcattccttcagacccagttttcccccaccctccttaccccgctgggctaggtctccgccagggctggcctcagtttctcctcaacaggcctggggg

SEQ ID NO: 4485 - DNA, 494 bp, Homo sapiens
  misc_feature (137)..(137): n includes a, c, g, or t, or contains no nucleotide
  misc_feature (209)..(209): n includes a, c, g, or t, or contains no nucleotide
  misc_feature (230)..(230): n includes a, c, g, or t, or contains no nucleotide
  misc_feature (306)..(306): n includes a, c, g, or t, or contains no nucleotide
  misc_feature (315)..(332): n includes a, c, g, or t, or contains no nucleotide
tggcctggagtaagcaggtccgacccctccttctttacagcttagtgttattctggcatttggttaagctggcttaatctgtttaatgttatcagtacattttaaataggggcattgaaatttactcccaccaccangggcttttttgggggatgcctgggcctttaaaacactagccaaactctaattaattctcaaatcactgccanggagttcttgctcctggctgncaggcccaggccccaaggtctccttcttggggtcacaaacagcagtaaggaagaggaatatatagcaactcagggncctgggaannnnnnnnnnnnnnnnnnttagggactggatacttctggctggctgagtatagtactagctgcctccccaccaggttccgagtagtgtctgagactctgctctgcagggcctagggtagcgctgggagtgtagaagtggcctgcccttaactgttttcactaaacagctttttctaaggg

SEQ ID NO: 4486 - DNA, 492 bp, Homo sapiens
  misc_feature (94)..(94): n includes a, c, g, or t, or contains no nucleotide
  misc_feature (107)..(107): n includes a, c, g, or t, or contains no nucleotide
  misc_feature (226)..(240): n includes a, c, g, or t, or contains no nucleotide
catgcattaacttgcggtatttttctgttaaaatgttaaccgtccttcccctagcaaatttaaaaacagaaagaaaatgttgtaccagttaccnattccgggttcgnagcatcacaagcttttgagcgcatggaactccataaactaacaaattacataaactaaagggggattttctttcttcttttgtttggtagaaaattatccttttctaaaaactgaacannnnnnnnnnnnnnngctatgtgcacccgtccaggacagaaccgtgcataggcaaaaggagtggagcacagcgtccggcccagtgtgtttccggttctgagtcagggtgatctgtggacgggaccccagcaccaagtctacgggtgccagatcagtagggcctgtgatttcctgtcagtgtcctcagctaatgtgaacagtgttggtctgctggttagaaactagaatattgatattttcaggaaagaaatcagctcagctctccac

SEQ ID NO: 4487 - DNA, 535 bp, Homo sapiens
gcagtgcgtatcacgcttcccgcaaggacatgctggatgccttgggcataactgccttgatcaacgtctcagccaattgtcccaaccattttgagggtcactaccagtacaagagcatccctgtggaggacaaccacaaggcagacatcagctcctggttcaacgaggccattgacttcatagactccatcaagaatgctggaggaagggtgtttgtccactgccaggcaggcatttcccggtcagccaccatctgccttgcttaccttatgaggactaatcgagtcaagctggacgaggcctttgagtttgtgaagcagaggcgaagcatcatctctcccaacttcagcttcatgggccagctgctgcagtttgagtcccaggtgctggctccgcactgttcggcagaggctgggagccccgccatggctgtgctcgaccgaggcacctccaccaccaccgtgttcaacttccccgtctccatccctgtccactccacgaacagtgcgctgagctaccttcagagccccattac

SEQ ID NO: 4488 - DNA, 476 bp, Homo sapiens
  misc_feature (115)..(137): n includes a, c, g, or t, or contains no nucleotide
  misc_feature (232)..(277): n includes a, c, g, or t, or contains no nucleotide
aaagcagcactgagaaacttttgattgttttcaatttcttcttttatgttcacaccaccacattcccattcactttgattttctacatgtaattaccttcttttgtttatcattnnnnnnnnnnnnnnnnnnnnnnngagatagaatagagggtgatgacggtaagagcaagtgtcccatgaatgtgatttcctgggttctcactgtctttgcaccacgtctaggaagaatnnnnnnnnnnnnnnnnnnnnnnnnnnnnnnnnnnnnnnnnnnnnnntggagtagagttcctggttgcttttcataagagggagagttactttctttgtatctctgcaagcagagatttctctttggttttgaggttgaagtgtctttggcccatttgtaagtccccatccctaccctacacaaagtaaaagcagaagatagataaaaaatgatgtaattgcagctggtaggatgtctggtgccaa

SEQ ID NO: 4489 - DNA, 538 bp, Homo sapiens
  misc_feature (29)..(29): n includes a, c, g, or t, or contains no nucleotide
  misc_feature (32)..(32): n includes a, c, g, or t, or contains no nucleotide
  misc_feature (40)..(40): n includes a, c, g, or t, or contains no nucleotide
  misc_feature (42)..(47): n includes a, c, g, or t, or contains no nucleotide
  misc_feature (50)..(51): n includes a, c, g, or t, or contains no nucleotide
  misc_feature (53)..(74): n includes a, c, g, or t, or contains no nucleotide
  misc_feature (76)..(90): n includes a, c, g, or t, or contains no nucleotide
  misc_feature (167)..(167): n includes a, c, g, or t, or contains no nucleotide
  misc_feature (203)..(203): n includes a, c, g, or t, or contains no nucleotide
  misc_feature (221)..(221): n includes a, c, g, or t, or contains no nucleotide
  misc_feature (271)..(271): n includes a, c, g, or t, or contains no nucleotide
  misc_feature (421)..(464): n includes a, c, g, or t, or contains no nucleotide
agtcccagccagagcccctagtggtcaanggnaaacgggngnnnnnnggnncnnnnnnnnnnnnnnnnnnnnnngnnnnnnnnnnnnnnntacatcaccacgtcgctgtacagtgcctgggacaagcagttttaccctgatctcatcagggaaggctctgtgatgcntgcaggttgatgtagacacagtaaaaggagggctgnaagttgaaccccaacttncctggtggacttcgggaaggagccccttggcccagcccttgcccatgagntccgctaccctgggggcgattgtagctctgacatctggatttgaactccaccctcatcacccacactccctattttgggccctcacttccttggggacctggcttcattctgctctctcttggcacccgacccttggcagcatgtaccannnnnnnnnnnnnnnnnnnnnnnnnnnnnnnnnnnnnnnnnnnnttactgaccactgttgcttgttgctcactgtgctgcttttccatgagctcttggaggcaccaagaaataaactc

SEQ ID NO: 4490 - DNA, 305 bp, Homo sapiens
  misc_feature (114)..(131): n includes a, c, g, or t, or contains no nucleotide
  misc_feature (134)..(139): n includes a, c, g, or t, or contains no nucleotide
  misc_feature (143)..(152): n includes a, c, g, or t, or contains no nucleotide
  misc_feature (154)..(168): n includes a, c, g, or t, or contains no nucleotide
  misc_feature (171)..(175): n includes a, c, g, or t, or contains no nucleotide
  misc_feature (177)..(180): n includes a, c, g, or t, or contains no nucleotide
  misc_feature (182)..(192): n includes a, c, g, or t, or contains no nucleotide
  misc_feature (196)..(196): n includes a, c, g, or t, or contains no nucleotide
  misc_feature (207)..(207): n includes a, c, g, or t, or contains no nucleotide
cctctccgagcgtaagaagcctctggacattgactacatgggggaggaacagctccgggagaaagcccaggagctgtcggactggatccaccagctggagtctgagaagttcgnnnnnnnnnnnnnnnnnnaannnnnnaaannnnnnnnnnannnnnnnnnnnnnnncannnnncnnnncnnnnnnnnnnnggangggggcagggnagggccgcgttggaggccgctggaagtgaggatgccgccccggacagtggcacctgggaagcctgggagtgtttgtcccatcggtagcttgaaataaa

SEQ ID NO: 4491 - DNA, 388 bp, Homo sapiens
  misc_feature (26)..(28): n includes a, c, g, or t, or contains no nucleotide
  misc_feature (39)..(39): n includes a, c, g, or t, or contains no nucleotide
  misc_feature (44)..(44): n includes a, c, g, or t, or contains no nucleotide
  misc_feature (67)..(67): n includes a, c, g, or t, or contains no nucleotide
caatccgtggaagagcccatggtgcnnnctgcggctggnaggtngcagctgccccagggaccccagncccagcctgttgccatgtccctctcagcagacaagttccaggtcctcctggcagaactgaagcaggcccagaccctgatgagctccctgggctgaggagaagggtgttccaggcctgtgtggagccgccctgcccgtatggagtcacgccctctgaactgctcttcgggaggcagccctggttctaggatgctgaggccctggcccggactctggcctcccagatccccagctgcctcacttctctcttgagaacttggctcagggctcctgaggacctttcccagcattaccttcccttcccttgaaaggcaattgttgg

SEQ ID NO: 4492 - DNA, 368 bp, Homo sapiens
  misc_feature (65)..(65): n includes a, c, g, or t, or contains no nucleotide
  misc_feature (83)..(83): n includes a, c, g, or t, or contains no nucleotide
  misc_feature (88)..(88): n includes a, c, g, or t, or contains no nucleotide
  misc_feature (101)..(101): n includes a, c, g, or t, or contains no nucleotide
  misc_feature (126)..(126): n includes a, c, g, or t, or contains no nucleotide
  misc_feature (140)..(140): n includes a, c, g, or t, or contains no nucleotide
caatagcaaacaacggaagagacgggcagagttgaagcaacaaagagaggaggaggcaacatggncaagagcaggaagccccntcggnagagacactcccnaccgaaagttcttgcgcagtggccngccattggcacccntggaaggcagccccccagttcatttcagccttccagtgctacacccacttcttggctgacacacttctgctctaagagtctccctccctttatagaatgtcaaccaaagagtgccctcctcccctctcagcctcctctttagctagcctccccatctcatcacaacgcatgtctgtgacctttggtaatcatttacagtgccacacggaaccctgtattttgcacaca

SEQ ID NO: 4493 - DNA, 571 bp, Homo sapiens
  misc_feature (65)..(65): n includes a, c, g, or t, or contains no nucleotide
  misc_feature (160)..(174): n includes a, c, g, or t, or contains no nucleotide
  misc_feature (339)..(354): n includes a, c, g, or t, or contains no nucleotide
gtgggcttcctggactcttggcctcactccttgccccctccccacgacacccatgagccgaaagnatgtcactaaggatggctgattccccaagggcacccgctctccctccctccctgctggaggaacacgtcatatcagatgagaggaagatggcctnnnnnnnnnnnnnnntttctcttaactcagcttttgctactttggcaaaaactagcgaggggtagcagaaacctgcaccaaggattgtccctatgtcttggcccctcctagagcgtgtgcagactgatgattttatatgtaaatcaagactcacatccctttcctagtcccccacatccnnnnnnnnnnnnnnnnccttgcagaccaatgggctccatgttctgtagccccctcccctacgcctcacccctcctccctctcacaggttctgggcggccagtgagagaaacgcagtgggggaggcagggagtctggtgcctgcagagattctctgcttctttcctggggggaggtggggaggtcttagcaggagcgggccctgtacccacctgctgacctgctgtttggtaga

SEQ ID NO: 4494 - DNA, 579 bp, Homo sapiens
  misc_feature (26)..(26): n includes a, c, g, or t, or contains no nucleotide
  misc_feature (65)..(65): n includes a, c, g, or t, or contains no nucleotide
  misc_feature (127)..(127): n includes a, c, g, or t, or contains no nucleotide
  misc_feature (142)..(142): n includes a, c, g, or t, or contains no nucleotide
  misc_feature (177)..(177): n includes a, c, g, or t, or contains no nucleotide
  misc_feature (193)..(193): n includes a, c, g, or t, or contains no nucleotide
  misc_feature (197)..(197): n includes a, c, g, or t, or contains no nucleotide
  misc_feature (344)..(344): n includes a, c, g, or t, or contains no nucleotide
  misc_feature (380)..(380): n includes a, c, g, or t, or contains no nucleotide
  misc_feature (495)..(495): n includes a, c, g, or t, or contains no nucleotide
  misc_feature (533)..(547): n includes a, c, g, or t, or contains no nucleotide
atgcgcaacaacctctcgctgggggnacgcgctggccaagtgggaggagtgccagcgccagctgntgctcggcctcttctgcaccaacgtggccttcccgcccgaagctctgcgcatgcgcgcaccngccgacccggctccngcccccgcggacccagcatccccgcagcaccagcnggccgggcctgccccnttgntgagcacccctgctcccgaggcccggcccgtgatcggggccctggggctgtgagaccccgaccctctcgaggaaccctgcctgagacgcctccattaccactgcgcagtgagatgaggggactcacagttgccaagaggggtctttnccgtgggccccctcgccagccactcaccagctgcanctgagaggggaggtttccacacccctcccctgggccgctgaggccccgcgcacctgtgccttaatcttccctcccctgtgctgcccgagcacctcccccgcccctttactcctgngaactttgcagctgcccttccctccccgtttttcatgnnnnnnnnnnnnnnntgtgtgaagaattatttattttcgccaaagca

SEQ ID NO: 4495 - DNA, 598 bp, Homo sapiens
  misc_feature (43)..(43): n includes a, c, g, or t, or contains no nucleotide
  misc_feature (58)..(59): n includes a, c, g, or t, or contains no nucleotide
  misc_feature (61)..(61): n includes a, c, g, or t, or contains no nucleotide
  misc_feature (73)..(73): n includes a, c, g, or t, or contains no nucleotide
  misc_feature (77)..(77): n includes a, c, g, or t, or contains no nucleotide
  misc_feature (87)..(115): n includes a, c, g, or t, or contains no nucleotide
  misc_feature (343)..(366): n includes a, c, g, or t, or contains no nucleotide
  misc_feature (467)..(468): n includes a, c, g, or t, or contains no nucleotide
  misc_feature (473)..(473): n includes a, c, g, or t, or contains no nucleotide
  misc_feature (491)..(491): n includes a, c, g, or t, or contains no nucleotide
gtagacttttctgcacttgcccttttcataacaatctatcttnggagaactttccctnngngaacatacagancttncctgtacacnnnnnnnnnnnnnnnnnnnnnnnnnnnnngcattatattttatgtaacctgtccactgttggtaggcacttgagttgttttagtcttttgctatcaaacagttctgggatgattaaccctgatttactgcaaaattgaaattgctctgctattctgctggaatggtggtaagtgaactgaaaattccagtcactcttgggctagactcaacgttcttaaaaactatgtggccatcaccaaattagttattttgaacnnnnnnnnnnnnnnnnnnnnnnnngaggtaatacttaccttaagtggctatgagaatgaagatcatgtgtatgaattgttggtgctctaaagaacagcacaaataaaattattttcaaatttaannttaantgaactatgtgtaatttnttaattttgaaataattttatttgtaatgtgcataatcttatttaatgtataatgtatacattgtaatagaaacagatttcccaaattccagcctggcatgaggtaa

SEQ ID NO: 4496 - DNA, 344 bp, Homo sapiens
actgcccaagtgaaaagcaaccaagtccaggaaattacaatagctgttaaggaaaggaaataatggtacagatctttttctgtctatcaaaactatttgatccaagtgaaaaaaaaaaaaaaactagaaagctacggaacctgccattagtattgtggtgtatttttaagattaaaggtacactgatggacaaaaaaaaaaagtaaaacatggcaaaaaataaaataactcctatactgccctcaaaatggagtttgcaattaatatcaggatttatctttgcaaaaatcagtgatttccacattcagccagtatagccagcagaaatttctgatccacaatgc

SEQ ID NO: 4497 - DNA, 237 bp, Homo sapiens
cactcaagagttagagcaggtggctgcaggccttgggcccggagggaaggccactgccggccacttggggcagacacagacacctcaaggatctgtcacggaaggcgtcctttttccttgtagctaacgttaggcctgagtagctcccctccatccttgtagacgctccagtccctactactgtgacggcatttccatccctcccctgcccgggaagggaccttgcagggacctctc

SEQ ID NO: 4498 - DNA, 473 bp, Homo sapiens
  misc_feature (55)..(55): n includes a, c, g, or t, or contains no nucleotide
  misc_feature (76)..(77): n includes a, c, g, or t, or contains no nucleotide
  misc_feature (79)..(79): n includes a, c, g, or t, or contains no nucleotide
accatccgttgcagaagcctccaggagcagcaatcctaagagtgggaggcagccnaagacccccttccttcaaaanncntcccggaagtggtttcaggccctctagttgccatgaccaatttgtgtgtgtgtttaatttttgcttcaagctctgtagcaggacctgccccacgcacacccctacccctctgtgaggagctgtgggaagtgtgggtttgtctccagaacagaagagaatgatggatattctggctctggggccctctccaccaccactcacagtagccttgctgaagccatcacagatgggagaaggccatgccagccacgtccgccgaggggcgccagcctgaagctgccaggccctgaggttcagaccctggaccccatagctggaggcctgtggtgccagaagcccagattagggtggctgtccatccctggatagctatttgcacgaatcatggacataa

SEQ ID NO: 4499 - DNA, 423 bp, Homo sapiens
  misc_feature (43)..(43): n includes a, c, g, or t, or contains no nucleotide
  misc_feature (45)..(45): n includes a, c, g, or t, or contains no nucleotide
  misc_feature (105)..(126): n includes a, c, g, or t, or contains no nucleotide
  misc_feature (131)..(143): n includes a, c, g, or t, or contains no nucleotide
  misc_feature (145)..(146): n includes a, c, g, or t, or contains no nucleotide
  misc_feature (154)..(154): n includes a, c, g, or t, or contains no nucleotide
  misc_feature (158)..(160): n includes a, c, g, or t, or contains no nucleotide
  misc_feature (202)..(238): n includes a, c, g, or t, or contains no nucleotide
aagcatctgttttattcagatctgggtggctcagggcctccangnagccagttttgcaggagattcagcacctagtgtcttcctgcctcacgctcccaagaaccnnnnnnnnnnnnnnnnnnnnnngaacnnnnnnnnnnnnncnngatgtcanaatnnngctggtcttcaggcttgaagtccaggttagggctgccatccnnnnnnnnnnnnnnnnnnnnnnnnnnnnnnnnnnnnnggtatttggctttgtacactttggtgaagacctcatccagggcctccagttccttggccgtgagacccgtagtgtcatgggtgaggtctgcaggatccaaggacatcttggctacccctctagtggagtccttccccgtcaaggcattgtagggggctcctcgtccataaaactcctttccggag

SEQ ID NO: 4500 - DNA, 430 bp, Homo sapiens
taccgtgacctaaaacttgacaacgtgatgctcgattctgagggacacatcaagattgccgattttggcatgtgtaaggaaaacatctgggatggggtgacaaccaagacattctgtggcactccagactacatcgcccccgagataattgcttatcagccctatgggaagtccgtggattggtgggcatttggagtcctgctgtatgaaatgttggctgggcaggcaccctttgaaggggaggatgaagatgaactcttccaatccatcatggaacacaacgtagcctatcccaagtctatgtccaaggaagctgtggccatctgcaaagggctgatgaccaaacacccaggcaaacgtctgggttgtggacctgaaggcgaacgtgatatcaaagagcatgcatttttccggtatattgattgggaga

SEQ ID NO: 4501 - DNA, 390 bp, Homo sapiens
  misc_feature (26)..(26): n includes a, c, g, or t, or contains no nucleotide
  misc_feature (33)..(33): n includes a, c, g, or t, or contains no nucleotide
  misc_feature (46)..(64): n includes a, c, g, or t, or contains no nucleotide
  misc_feature (67)..(74): n includes a, c, g, or t, or contains no nucleotide
  misc_feature (82)..(82): n includes a, c, g, or t, or contains no nucleotide
  misc_feature (88)..(88): n includes a, c, g, or t, or contains no nucleotide
  misc_feature (98)..(98): n includes a, c, g, or t, or contains no nucleotide
  misc_feature (127)..(127): n includes a, c, g, or t, or contains no nucleotide
  misc_feature (139)..(139): n includes a, c, g, or t, or contains no nucleotide
  misc_feature (141)..(148): n includes a, c, g, or t, or contains no nucleotide
  misc_feature (151)..(151): n includes a, c, g, or t, or contains no nucleotide
  misc_feature (156)..(156): n includes a, c, g, or t, or contains no nucleotide
  misc_feature (159)..(159): n includes a, c, g, or t, or contains no nucleotide
  misc_feature (175)..(175): n includes a, c, g, or t, or contains no nucleotide
  misc_feature (190)..(190): n includes a, c, g, or t, or contains no nucleotide
  misc_feature (199)..(199): n includes a, c, g, or t, or contains no nucleotide
  misc_feature (229)..(229): n includes a, c, g, or t, or contains no nucleotide
  misc_feature (259)..(259): n includes a, c, g, or t, or contains no nucleotide
  misc_feature (274)..(274): n includes a, c, g, or t, or contains no nucleotide
  misc_feature (337)..(337): n includes a, c, g, or t, or contains no nucleotide
  misc_feature (349)..(349): n includes a, c, g, or t, or contains no nucleotide
  misc_feature (355)..(355): n includes a, c, g, or t, or contains no nucleotide
gccaatcagatggtcaagtgtgaccntcgccanggcaagtacatgnnnnnnnnnnnnnnnnnnnagnnnnnnnntggtcccnaaagangtcaacgcgnccatcgccaccatcaagaccaagcgcacnatccagtttgtngnnnnnnnnccnactgnatntaaggtgggcattaantaccagccccccacngtggtcccngggggagacctggccaaggtgcagcgggcngtgtgcatgctgagcaacaccacggccatngcggaggcctgggcncgcctggaccataagttcgatctcatgtatgccaagcgggcctttgtgcactggtacgtgggngaaggcatggangagggngagttctctgaggcccgcgaggacctggcagctct

SEQ ID NO: 4502 - DNA, 556 bp, Homo sapiens
  misc_feature (26)..(26): n includes a, c, g, or t, or contains no nucleotide
  misc_feature (33)..(34): n includes a, c, g, or t, or contains no nucleotide
  misc_feature (155)..(155): n includes a, c, g, or t, or contains no nucleotide
  misc_feature (260)..(260): n includes a, c, g, or t, or contains no nucleotide
  misc_feature (270)..(270): n includes a, c, g, or t, or contains no nucleotide
  misc_feature (272)..(272): n includes a, c, g, or t, or contains no nucleotide
  misc_feature (308)..(308): n includes a, c, g, or t, or contains no nucleotide
  misc_feature (329)..(329): n includes a, c, g, or t, or contains no nucleotide
  misc_feature (347)..(347): n includes a, c, g, or t, or contains no nucleotide
  misc_feature (374)..(374): n includes a, c, g, or t, or contains no nucleotide
  misc_feature (384)..(430): n includes a, c, g, or t, or contains no nucleotide
  misc_feature (435)..(437): n includes a, c, g, or t, or contains no nucleotide
  misc_feature (439)..(442): n includes a, c, g, or t, or contains no nucleotide
  misc_feature (445)..(447): n includes a, c, g, or t, or contains no nucleotide
  misc_feature (454)..(454): n includes a, c, g, or t, or contains no nucleotide
  misc_feature (459)..(459): n includes a, c, g, or t, or contains no nucleotide
  misc_feature (499)..(499): n includes a, c, g, or t, or contains no nucleotide
ctctcagaagcaccttggggcctcgncagggcnngtggtcttcaccgaggcgtgggtgggcagccgttccccaggctgtgtggggtcctgctttcttctgctgagacagtgacgctttccagtttccaccctaatcagccactgctggtcacagncccacagccatgggtatttctgtggtctcctcgcttcattgaagcaaagcatgagccttcctagacaagggcagctggggaggggaagggaccggaagtttgtgnaagttgaacnantccatccatctgcactgagaggctggatcctgagtncccggggcagcaggatcccanggaaccttcctcctccangggcagcacaggactcagccatgtctnggaccggccnnnnnnnnnnnnnnnnnnnnnnnnnnnnnnnnnnnnnnnnnnnnnnncaggnnngnnnnggnnngggtccntgaanatgggtgttggggagcagtgggtcaagaagttggagccanagttttactcactttgctttaattttcagggctacaatacaggtcagagacaatggc

SEQ ID NO: 4503 - DNA, 492 bp, Homo sapiens
  misc_feature (165)..(165): n includes a, c, g, or t, or contains no nucleotide
  misc_feature (227)..(308): n includes a, c, g, or t, or contains no nucleotide
ccacttgcagttctttaaagaatgctgctttttattctcctaaccctttcaagtgggtgcagacttctcgttagcagctggaagacattcctcccacacttttcccttcctggcccaagagagcatccagaaggcagtaggacctggtttttcaggtactggganccgggggctcactgcttgcactgtgcttagggtagggatggtaaatatcctccctgcatggnnnnnnnnnnnnnnnnnnnnnnnnnnnnnnnnnnnnnnnnnnnnnnnnnnnnnnnnnnnnnnnnnnnnnnnnnnnnnnnnnnccatctggagctggtgctataggtgaccatctggtacattgaggggacctgtttgcctcctccactctataagcagtcatcttgggagaccgggaggagaaggtggtgggctagtcctgtgtcctcctccacttcccatgcctctatgttacccatctgtgtctcctgtgcagaaggagaggaa

SEQ ID NO: 4504 - DNA, 528 bp, Homo sapiens
  misc_feature (186)..(186): n includes a, c, g, or t, or contains no nucleotide
tttctaccatttcagagaggccttttggaatgtggcccctgaacaagaattggaagctgccctgcccatgggagctggttagaaatgcagaatcctaggctccaccccatccagttcatgagaatctatatttaacaagatctgcagggggtgtgtctgctcagtaatttgaggacaaccattccnagactgcttccaattttctggaatacatgaaatatagatcagttataagtagcaggccaagtcaggcccttattttcaagaaactgaggaattttctttgtgtagctttgctctttggtagaaaaggctaggtacacagctctagacactgccacacagggtctgcaaggtctttggttcagctaagctaggaatgaaatcctgcttcagtgtatggaaataaatgtatcatagaaatgtaacttttgtaagacaaaggttttcctcttctattttgtaaactcaaaatatttgtacatagttatttatttattggagataatctagaacacaggcaaaatc

SEQ ID NO: 4505 - DNA, 244 bp, Homo sapiens
  misc_feature (59)..(60): n includes a, c, g, or t, or contains no nucleotide
  misc_feature (63)..(66): n includes a, c, g, or t, or contains no nucleotide
  misc_feature (109)..(109): n includes a, c, g, or t, or contains no nucleotide
  misc_feature (129)..(129): n includes a, c, g, or t, or contains no nucleotide
  misc_feature (153)..(153): n includes a, c, g, or t, or contains no nucleotide
  misc_feature (168)..(206): n includes a, c, g, or t, or contains no nucleotide
gagattcataaatcttctatattgagaattggctatgttaataaatattacaacatcannaannnnttagctaagtttgattcatgctgtctgttaaatcaaaactganctaaatcagaattattaaangtgaggagcttttttaatacaggnaaagaaacatgtcannnnnnnnnnnnnnnnnnnnnnnnnnnnnnnnnnnnnnnctcatgagtagcatccacatttttaaaatttcaaattg

SEQ ID NO: 4506 - DNA, 469 bp, Homo sapiens
  misc_feature (56)..(111): n includes a, c, g, or t, or contains no nucleotide
  misc_feature (379)..(379): n includes a, c, g, or t, or contains no nucleotide
  misc_feature (393)..(394): n includes a, c, g, or t, or contains no nucleotide
  misc_feature (396)..(401): n includes a, c, g, or t, or contains no nucleotide
  misc_feature (404)..(405): n includes a, c, g, or t, or contains no nucleotide
ggccgagcagtatgtcagcgcgttctccaaactggccaaggactccaacactatcnnnnnnnnnnnnnnnnnnnnnnnnnnnnnnnnnnnnnnnnnnnnnnnnnnnnnnnnatatggagccctcaccaaagccccagtgccagggactccagactcactctccagtgggagcagcagagatgtccagggtacagatgcaagtcttgatgaggaacttgatcgagtcaagatgagttagtggagctgggcttggccagggagtctggggacaaggaagcagattttcctgattctggctctagcttccctgccaagattttggtttttatttttttatttgaactttagtcgtgtaataaactcaccagtggcaaaccanaaaaaaaaaaaaannannnnnnaannaagttgggaaagtcactagcattttccttggatccagtcctgtcagcatgatgcctccatgaat

SEQ ID NO: 4507 - DNA, 493 bp, Homo sapiens
  misc_feature (94)..(110): n includes a, c, g, or t, or contains no nucleotide
tgtgggtcctttctgtgcactatgaacgcttctttcccaggacagaaaatgtgtagtctacctttattttttattaacaaaacttgttttttannnnnnnnnnnnnnnnncttaactttaggtaactctgctgtgctggagatcatctttaagggcaaaggagttggattgctgaattacaatgaaacatgtcttattactaaagaaagtgatttactcctggttagtacattctcagaggattctgaaccactagagtttccttgattcagactttgaatgtactgttctatagtttttcaggatcttaaaactaacacttataaaactcttatcttgagtctaaaaatgacctcatatagtagtgaggaacataattcatgcaattgtattttgtatactattattgttctttcacttattcagaacattacatgccttcaaaatgggattgtactataccagtaagtgccacttctgtgtctttctaatg

SEQ ID NO: 4508 - DNA, 241 bp, Homo sapiens
ttcaggactctacctcatatcagtttgctagcagaaatctagaagactgtcagcttccaaacattaatgcaatggttaacatcttctgtctttataatctactccttgtaaagactgtagaagaaagcgcaacaatccatctctcaagtagtgtatcacagtagtagcctccaggtttccttaagggacaacatccttaagtcaaaagagagaagaggcaccactaaaagatcgcagtttg

SEQ ID NO: 4509 - DNA, 380 bp, Homo sapiens
  misc_feature (31)..(31): n includes a, c, g, or t, or contains no nucleotide
  misc_feature (157)..(176): n includes a, c, g, or t, or contains no nucleotide
  misc_feature (239)..(256): n includes a, c, g, or t, or contains no nucleotide
  misc_feature (289)..(355): n includes a, c, g, or t, or contains no nucleotide
caccatgacggaactagagacagccatgggnatgatcatagacgtcttttcccgatattcgggcagcgagggcagcacgcagaccctgaccaagggggagctcaaggtgctgatggagaaggagctaccaggcttcctgcagagtggaaaagacaannnnnnnnnnnnnnnnnnnntcaaggacctggacgccaatggagatgcccaggtggacttcagtgagttcatcgtgttcgtgnnnnnnnnnnnnnnnnnntgtcacaagtactttgagaaggcaggactcaannnnnnnnnnnnnnnnnnnnnnnnnnnnnnnnnnnnnnnnnnnnnnnnnnnnnnnnnnnnnnnnnnntgttggcaattattcccctaggctg

SEQ ID NO: 4510 - DNA, 425 bp, Homo sapiens
  misc_feature (26)..(26): n includes a, c, g, or t, or contains no nucleotide
  misc_feature (52)..(52): n includes a, c, g, or t, or contains no nucleotide
  misc_feature (295)..(315): n includes a, c, g, or t, or contains no nucleotide
gtctgatcagcatcactgcacacggnggtctagtgagcctcttgctaagtgntcacacacactcttcccaaagacgtgatgagttaaagttgtattctgaaatcatgaagccagagcctgtgccagaccttctgctacctctcatagaattgctctgtaattctaaatttaaaattagaagtagagagagataagccatcgcccctttgcctctgagaattggctgctgtttctaatataattattttctaagatagccagatagttagaaaaagattttcattgatgacatatnnnnnnnnnnnnnnnnnnnnntattctaaattgagcaaactgaaagattttcatcaggaaaggagcactgtgggaagagcccagtattcacattttttccccatttttcagaagcgacatttcatatatag

SEQ ID NO: 4511 - DNA, 530 bp, Homo sapiens
  misc_feature (91)..(91): n includes a, c, g, or t, or contains no nucleotide
  misc_feature (97)..(97): n includes a, c, g, or t, or contains no nucleotide
  misc_feature (114)..(115): n includes a, c, g, or t, or contains no nucleotide
  misc_feature (120)..(120): n includes a, c, g, or t, or contains no nucleotide
  misc_feature (122)..(122): n includes a, c, g, or t, or contains no nucleotide
  misc_feature (157)..(157): n includes a, c, g, or t, or contains no nucleotide
  misc_feature (169)..(169): n includes a, c, g, or t, or contains no nucleotide
  misc_feature (171)..(171): n includes a, c, g, or t, or contains no nucleotide
  misc_feature (178)..(178): n includes a, c, g, or t, or contains no nucleotide
  misc_feature (181)..(181): n includes a, c, g, or t, or contains no nucleotide
  misc_feature (198)..(198): n includes a, c, g, or t, or contains no nucleotide
  misc_feature (221)..(221): n includes a, c, g, or t, or contains no nucleotide
  misc_feature (374)..(374): n includes a, c, g, or t, or contains no nucleotide
  misc_feature (427)..(455): n includes a, c, g, or t, or contains no nucleotide
  misc_feature (483)..(505): n includes a, c, g, or t, or contains no nucleotide
ccgtagccctcacgtgggtgtgaaggacgtggagtgtggggaaggacacttctgccatgataaccagacctgctgccgagacaaccgacangggctngggcctgctgtccctannccgcnangggcgtctgttgtgctgatcggcgccactgctgtncctgctggcttncnctgcgcnagnccaggggtaccaagtgntttgcgcagggaggccccgcgcntgggacgcccctttgagggacccagccttgagacagctgctgtgagggacagtactgaagactctgcagccctcgggaccccactcggagggtgccctctgctcaggcctccctagcacctccccctaaccaaattctccctggaccccattntgagctccccatcaccatgggaggtggggcctcaatctaaggccttccctgtnnnnnnnnnnnnnnnnnnnnnnnnnnnnntacaagctgccatcccctccccgtttcnnnnnnnnnnnnnnnnnnnnnnnttttccctatccacaggggtgtttg

SEQ ID NO: 4512 - DNA, 253 bp, Homo sapiens
aggagcgactgctaatcagtatggggtttcctcccgggatggtgaaaatgttccggacctagatactgacgaaggtagcacgacactgtgagtgcactaaatgctattgaattggacactttgaaatggtgaatttcgtggtatgtgaattctacctcaatcaaaaaaatttgctattttatctcacatacattttttttctgtccaggttgttcatataataatatgctgtgagcatctttccatgacatta

SEQ ID NO: 4513 - DNA, 411 bp, Homo sapiens
  misc_feature (136)..(150): n includes a, c, g, or t, or contains no nucleotide
  misc_feature (283)..(309): n includes a, c, g, or t, or contains no nucleotide
  misc_feature (355)..(361): n includes a, c, g, or t, or contains no nucleotide
  misc_feature (367)..(371): n includes a, c, g, or t, or contains no nucleotide
  misc_feature (373)..(376): n includes a, c, g, or t, or contains no nucleotide
ttggacagacacagagggacccttggctcctgtgtctggtccacacaccacagaagcttgtattatcagtgaatataaatgtactacatttgcatgccttttgggtttgccttaattcttacctcatttgcatccnnnnnnnnnnnnnnnagctgttttggatgaatgcagtataaaatgtaaaaaccctgctaaatgacttattgattaagtatatctatctatatatacatatacacaaagatattatttatcgaaagtaaaaaagatggaagtgtattgnnnnnnnnnnnnnnnnnnnnnnnnnnncaatgtggtggcaataaatgtcccaaataaatttataacaattgannnnnnncctaannnnnannnnataattttaaaattgcagcagttgctagcaacaac

SEQ ID NO: 4514 - DNA, 300 bp, Homo sapiens
ccaagaaggcggtgactaaggcgcagaagaaagacggcaagagcgcagcgcaccgcaaggagagctattccatctatgtgtacaaggttctgaagcaggtccaccctgacaccggcatttcgtccaaggccatgggcatcatgaattcgtttgtgaacgacattttcgagcgcatcgcaggtgaggcttcccgccttgcgcattacaacaagcgctcgaccatcacctccagggagatccagacggccgtgcgcctgctgctgcctggggagttggccaagcacgccgtgtccgagggta

SEQ ID NO: 4515 - DNA, 506 bp, Homo sapiens
  misc_feature (104)..(137): n includes a, c, g, or t, or contains no nucleotide
  misc_feature (182)..(199): n includes a, c, g, or t, or contains no nucleotide
  misc_feature (229)..(229): n includes a, c, g, or t, or contains no nucleotide
  misc_feature (235)..(338): n includes a, c, g, or t, or contains no nucleotide
cctttgaagtaagtggctagaaacagcactctggttataattgccccagggcctgattcaggactgactctccaccataaaactggaagctgcttcccctgtannnnnnnnnnnnnnnnnnnnnnnnnnnnnnnnnngtgagcccctattattactttcagattgtctgtgacactcaagcnnnnnnnnnnnnnnnnnntctacctccattctgaagagggaggttttnggtgtnnnnnnnnnnnnnnnnnnnnnnnnnnnnnnnnnnnnnnnnnnnnnnnnnnnnnnnnnnnnnnnnnnnnnnnnnnnnnnnnnnnnnnnnnnnnnnnnnnnnnnnnaagagacggggcaaatgtggatccaagaaaccagggccatgaccaggtccactgtggagcagccatctatctacctgactcctgagccaggctgccgtggtgtcatttctgtcatccgtgctctgtttccttttggagtttcttctccacattatctttgttcctggg

SEQ ID NO: 4516 - DNA, 428 bp, Homo sapiens
  misc_feature (72)..(72): n includes a, c, g, or t, or contains no nucleotide
  misc_feature (79)..(79): n includes a, c, g, or t, or contains no nucleotide
ctgtgtatgtcagttgctgcagaaatggatttggaagatggaggagagatgcccaagcaacgggatcccaantctaacnaaacaccatctggaatcctgatgtggaaagcaggggtttctggtctactggctagagctaaggaagttgaaaaggaaagctcacttctttggaggcacctgtccagaagcctggcctaggcagcttcaacctttgaacttactttttgaaatgaaaagtaatttatttgttttgctacatactgttccagacttttaaaggggacaatgaaggtgactgtggggaggagcatgtcaggtttgggcttggttgttttagaagcacctgggtgtgcctacctactcctcttttcttttaaaagggcccacaatgctccaatttcctgtctcctttagagagacatgaaact

SEQ ID NO: 4517 - DNA, 88 bp, Homo sapiens
gcaccttgtcctgtgtctgaggtcctgtgactgtaccctcctttgccctgggacatctgtatctcttggctttgtaataaatgctgca

SEQ ID NO: 4518 - DNA, 585 bp, Homo sapiens
  misc_feature (113)..(114): n includes a, c, g, or t, or contains no nucleotide
  misc_feature (122)..(125): n includes a, c, g, or t, or contains no nucleotide
  misc_feature (128)..(128): n includes a, c, g, or t, or contains no nucleotide
  misc_feature (134)..(134): n includes a, c, g, or t, or contains no nucleotide
  misc_feature (147)..(147): n includes a, c, g, or t, or contains no nucleotide
  misc_feature (170)..(187): n includes a, c, g, or t, or contains no nucleotide
  misc_feature (299)..(324): n includes a, c, g, or t, or contains no nucleotide
  misc_feature (355)..(371): n includes a, c, g, or t, or contains no nucleotide
  misc_feature (546)..(546): n includes a, c, g, or t, or contains no nucleotide
tagatggcatcattcttccaggagtgacaaggcggtgcattctggacctggcacatcagtgggtgggtgcctttgatatgaacaacttttgtaagcctgaaataaaaaataannaaaataannnnaanagagtnagagagatgtttngctctggtacagcctgtgttgtnnnnnnnnnnnnnnnnnnactgtacaaaggcgagacaatacacattccaactatggagaatggtcctaagctggcaagccgcatcttgagcaaattaactgatatccagtatggaagagaagagagcgannnnnnnnnnnnnnnnnnnnnnnnnnaaaatagaggatacaatggaaaatagaggannnnnnnnnnnnnnnnntgggacagactgttgcatttgaattgtgatagatttctttggctacctgtgcataatgtagtttgtagtatcaatgtgttacaagagtgattgtttcttcatgccagagaaaatgaattgcaatcatcaaatggtgtttcataacttggtagtagtaacttaccttaccttaccnagaaaaatattaatgtaagccatataacatgggattttc

SEQ ID NO: 4519 - DNA, 469 bp, Homo sapiens
  misc_feature (81)..(113): n includes a, c, g, or t, or contains no nucleotide
  misc_feature (378)..(401): n includes a, c, g, or t, or contains no nucleotide
gtcgcattaatgaggcccttccacatcatttttaaactaatgtttttctatattaacattattatggatatttggctttcnnnnnnnnnnnnnnnnnnnnnnnnnnnnnnnnncccatgctccaatcaaagggatttttagtagtgcctctaagcaagcaccgatgagtcagtcccacgtattttcttttttgtcagtattgtttgggaaggagacatgccgggatgtgtcatcgtgccaaataccacatttcctgttggcacagtttcacagaagtaaacataagcatgttttaacaggtttttcttttcttttttcttttttaaaatgttttatttatttaacccgccattgtgtgtttttaagtattttcttttnnnnnnnnnnnnnnnnnnnnnnnncaatctaactggctatgttattattattaaatttatgttttgcaacttagaaaccagctacagtatgg

SEQ ID NO: 4520 - DNA, 401 bp, Homo sapiens
  misc_feature (80)..(105): n includes a, c, g, or t, or contains no nucleotide
aactttacaaatccatgaagggtgctggcacagatgagaagactctgaccaggatcatggtatcccgcagtgagattgannnnnnnnnnnnnnnnnnnnnnnnnnttgagaaatatgacaagtctctccaccaagccattgagggtgacacctccggagacttcctgaaggccttgctggctctctgtggtggtgaggactagggccacagctttggcgggcacttctgccaagaaatggttatcagcaccagccgccatggccaagcctgattgttccagctccagagactaaggaaggggcaggggtggggggaggggttgggttgggctcttatcttcagtggagcttaggaaacgctcccactcccacgggccatcgagggcccagcacggctgagc

SEQ ID NO: 4521 - DNA, 464 bp, Homo sapiens
tcacccacgctgctggccctgtgagggggcagggaaggggaggcagccggcacccacaagtgccactgcccgagctggtgcattacagagaggagaaacacatcttccctagagggttcctgtagacctagggaggaccttatctgtgcgtgaaacacaccaggctgtgggcctcaaggacttgaaagcatccatgtgtggactcaagtccttacctcttccggagatgtagcaaaacgcatggagtgtgtattgttcccagtgacacttcagagagctggtagttagtagcatgttgagccaggcctgggtctgtgtctcttttctctttctccttagtcttctcatagcattaactaatctattgggttcattattggaattaacctggtgctggatattttcaaattgtatctagtgcagctgattttaacaataactactgtgttcctggcaatagtgtg

SEQ ID NO: 4522 - DNA, 582 bp, Homo sapiens
  misc_feature (533)..(533): n includes a, c, g, or t, or contains no nucleotide
cgtgaccgagtctcttcaggcgtgcaagctggcccaggccaatggttggggcgtcatggtgtctcatcgttcgggggagactgaagataccttcatcgctgacctggttgtggggctgtgcactggggcagatcaagactggtgccccttgccgatcacgcgcttggccaagtacaaccagctcctcagaattgaagaggagctgggcagcaaggctaagtttgccggcaggaacttcagaaaccccttggccaagtaagctgtgggcaggcaagccttcggtcacctgttggctacagacccctcccctggtgtcagctcaggcagctcgaggcccccgaccaacacttgcaggggtccctgctagttagcgcccaccgccgtggagttcgtaccgcttccttagaactctacagaagccaagctccctggaagccctgttggcagctctagctttgcagttgtgtaattggcccaagtcattgtttttctcgccttactttccaccaagtgtctagagtcatgtgagcctngtgtcatctccggggtggccacaggctagatccccggtggttttgtgct

SEQ ID NO: 4523 - DNA, 227 bp, Homo sapiens
taaatagctatatccatgtactgtagtttttcttcaacatcaatgttcattgtaatgttactgatcatgcattgttgaggtggtctgaatgttctgacattaacagttttccatgaaaacgttttattgtgtttttaatttatttattaagatggattctcagatatttatatttttattttatttttttctaccttgaggtcttttgacatgtggaaagtgaattt

SEQ ID NO: 4524 - DNA, 591 bp, Homo sapiens
  misc_feature (46)..(46): n includes a, c, g, or t, or contains no nucleotide
  misc_feature (57)..(57): n includes a, c, g, or t, or contains no nucleotide
  misc_feature (195)..(220): n includes a, c, g, or t, or contains no nucleotide
  misc_feature (282)..(311): n includes a, c, g, or t, or contains no nucleotide
  misc_feature (413)..(413): n includes a, c, g, or t, or contains no nucleotide
  misc_feature (440)..(440): n includes a, c, g, or t, or contains no nucleotide
  misc_feature (503)..(503): n includes a, c, g, or t, or contains no nucleotide
  misc_feature (560)..(560): n includes a, c, g, or t, or contains no nucleotide
gcaagcatgctctccggggtttttttaatggccttcgaacagaacntgccacatacncaggtataatagtttctaacatttgcccaggacctgtgcaatcaaatattgtggagaattccctagctggagaagtcacaaagactataggcaataatggagaccagtcccacaagatgacaaccagtcgttgtgtgnnnnnnnnnnnnnnnnnnnnnnnnnntgatttgaaagaagtttggatctcagaacaacctttcttgttagtaacatatttgtggcaannnnnnnnnnnnnnnnnnnnnnnnnnnnnnaacaagatggggaagaaaaggattgagaactttaagagtggtgtggatgcagactcttcttattttaaaatctttaagacaaaacatgactgaaaagagcanctgtacttttcaagccactggaggganaaatggaaaacatgaaaacagcaatcttcttatgcttctgaataatcaaagactaatttgtgnttttactttttaatagatatgactttgcttccaacatggaatgaaataaaaaataantaataaaagattgccatgaatcttgcaaaaa

SEQ ID NO: 4525 - DNA, 184 bp, Homo sapiens
  misc_feature (118)..(118): n includes a, c, g, or t, or contains no nucleotide
atggcacatccttgctgctggggacttggccctgctatttatttttgtatttatgtcttaatctcttccactgatgcatcctccaagggtagatggggagggtctgtgtgaaggggcnggcttctcttggtgcctgctgggttgcaggggcaggaagcgtgtggactgcagcttctgctggtgc

SEQ ID NO: 4526 - DNA, 553 bp, Homo sapiens
gttgtttggcagcagctttgaacgtagcgcctgtgaactcaggaatgcacagttgacttgggaagcagtattactagatctggaggcaaccacaggacactaaacttctcccagcctcttcaggaaagaaacctcattctttggcaagcaggaggtgacactagatggctgtgaatgtgatccgctcactgacactctgtaaaggccaatcaatgcactgtctgtcctctcctttttaggagtaagccatcccacaagttctataccatatttttagtgacagttgaggttgtagatacactttataacattttatagtttaaagagctttattaatgcaataaattaactttgtacacatttttatataaaaaaacagcaagtgatttcagaatgttgtaggcctcattagagcttggtctccaaaaatctgtttgaaaaaagcaacatgttcttcacagtgttcccctagaaaggaagagatttaattgccagttagatgtggcatgaaatgagggacaaagaaagcatctcgtaggtgtgtctactgggt

SEQ ID NO: 4527 - DNA, 384 bp, Homo sapiens
  misc_feature (26)..(26): n includes a, c, g, or t, or contains no nucleotide
  misc_feature (72)..(72): n includes a, c, g, or t, or contains no nucleotide
  misc_feature (84)..(84): n includes a, c, g, or t, or contains no nucleotide
  misc_feature (90)..(90): n includes a, c, g, or t, or contains no nucleotide
  misc_feature (100)..(119): n includes a, c, g, or t, or contains no nucleotide
aaatgggaattccagcactaagccanggcaccgggcagaagctgggccttccgcctcccttggatggggtcnaagaggccaggncctggnacattttggnnnnnnnnnnnnnnnnnnnntctcacctacacccacgcacccccccacacactatgctctctcaagaatgtaatttattggggcccccccagctgctttcctcacctgcccctgccctaccttacacccccagcttgacttctttccagtccacgtgtgtatataatgatatctatatttttgcccaggtctgggtattgctcctgcccagaccctgacatccctttccactgtgtgtgtgaccatgctgggggagggggactctgcttggaattaaaaggttgc

SEQ ID NO: 4528 - DNA, 124 bp, Homo sapiens
tagcctgtggcctttgcaatttgttaaggttcaagacagatgggcatatgtgtcagtggggctctctgagtcctggcccaaagaagcaaggaaccaaatttaagactctcgcatcttcccaacc

SEQ ID NO: 4529 - DNA, 49 bp, Homo sapiens
aagttaaaacgtcacaaaggtgctgcttttacagggaagcttattctgt

SEQ ID NO: 4530 - DNA, 91 bp, Homo sapiens
cttttttcctgtgaacagtattgaaaaaccccaacggctgataattaagtgaattaactgtgtctcccttgtcttaggatattctgtagat

SEQ ID NO: 4531 - DNA, 251 bp, Homo sapiens
ctggctgtatgagtagcccggcagatgcgcgtcacagaggctctcacattccagcctcctccagggcccaggtgggcggcttctggccccaccccacagcgcttggagcatccctttggacgggctgctgaacatccacctgtctggacgttgcatggagggtggcgcagcctctccaatccctggcgtacagggtttcctgcccgaggacctgctccaggagcctgcgcggctcgcctggaaacgtgcca

SEQ ID NO: 4532 - DNA, 415 bp, Homo sapiens
  misc_feature (27)..(27): n includes a, c, g, or t, or contains no nucleotide
  misc_feature (31)..(31): n includes a, c, g, or t, or contains no nucleotide
  misc_feature (54)..(54): n includes a, c, g, or t, or contains no nucleotide
  misc_feature (94)..(164): n includes a, c, g, or t, or contains no nucleotide
  misc_feature (185)..(185): n includes a, c, g, or t, or contains no nucleotide
  misc_feature (311)..(343): n includes a, c, g, or t, or contains no nucleotide
acatttcccgcaacaaggagcagggcnaccntatgaggacttcgtggagggccntgcgtgtctttgacaaggagagcaatggcacggtcatggnnnnnnnnnnnnnnnnnnnnnnnnnnnnnnnnnnnnnnnnnnnnnnnnnnnnnnnnnnnnnnnnnnnnnnntgttagctgggcaagaggatnccaatggctgcatcaattatgaagcctttgtcaagcacatcatgtcagggtgaagcagagtcttccaggtgcctggcccttggctttagccataccagggtgagttaaagagaggccccggctggnnnnnnnnnnnnnnnnnnnnnnnnnnnnnnnnncaccactgccccaaggaccttacaggccctccctgttaataaacagctctaacacggccaggctgggctctg

SEQ ID NO: 4533 - DNA, 427 bp, Homo sapiens
  misc_feature (351)..(351): n includes a, c, g, or t, or contains no nucleotide
gcagttctgttgcatgatttcccaaatgaaatactgccttggctagagtttgaaaaactaattgagcctgtgcctggctagaaaacaagcgtttatttgaatgtgaatagtgtttcaaaggtatgtagttacagaattcctaccaaacagcttaaattcttcaagaaagaattcctgcagcagttattcccttacctgaaggcttcaatcatttggatcaacaactgctactctcgggaagactcctctactcacagctgaagaaaatgagcacacccttcacactgttatcacctatcctgaagatgtgatacactgaatggaaataaatagatgtaaataaaattgagntctcatttaaaaaaaaccatgtgcccaatgggaaaatgacctcatgttgtggtttaaacagcaactgcacccacta

SEQ ID NO: 4534 - DNA, 464 bp, Homo sapiens
  misc_feature (26)..(27): n includes a, c, g, or t, or contains no nucleotide
  misc_feature (43)..(57): n includes a, c, g, or t, or contains no nucleotide
  misc_feature (143)..(143): n includes a, c, g, or t, or contains no nucleotide
  misc_feature (145)..(183): n includes a, c, g, or t, or contains no nucleotide
  misc_feature (199)..(228): n includes a, c, g, or t, or contains no nucleotide
  misc_feature (322)..(341): n includes a, c, g, or t, or contains no nucleotide
gaatccggggcaccagctaccagagnncctcacggcatccccnnnnnnnnnnnnnnncggctgcttatcgtctccaccaccccctacagcgagaaagacacgaagcagatcctccgcatccggtgcgaggaagaagatgtggngnnnnnnnnnnnnnnnnnnnnnnnnnnnnnnnnnnnnnnnggctggagacgtcacnnnnnnnnnnnnnnnnnnnnnnnnnnnnnnccagcttggtgtgccggaaacgcaagggtacagaagtgcaggtggatgacatcaagcgggtctactcactcttcctggacgagtcccgctccannnnnnnnnnnnnnnnnnnncaggacgccttcctcttcaacgaactcaaaggcgagaccatggacacctcctgagttggatgtcatcccccgaccccaccctgttttccaccagagttctgacactgtgactctgtataaaat

SEQ ID NO: 4535 - DNA, 506 bp, Homo sapiens
  misc_feature (156)..(156): n includes a, c, g, or t, or contains no nucleotide
  misc_feature (160)..(160): n includes a, c, g, or t, or contains no nucleotide
  misc_feature (163)..(163): n includes a, c, g, or t, or contains no nucleotide
  misc_feature (168)..(173): n includes a, c, g, or t, or contains no nucleotide
  misc_feature (176)..(201): n includes a, c, g, or t, or contains no nucleotide
  misc_feature (204)..(204): n includes a, c, g, or t, or contains no nucleotide
  misc_feature (209)..(209): n includes a, c, g, or t, or contains no nucleotide
  misc_feature (212)..(212): n includes a, c, g, or t, or contains no nucleotide
  misc_feature (219)..(219): n includes a, c, g, or t, or contains no nucleotide
  misc_feature (323)..(323): n includes a, c, g, or t, or contains no nucleotide
ttccgctttgtggatctgtatggcgcccagaagatagtggaccggctcaagaaatatgaagctgcctatggaaaacagttcaccccatgccagctgctagctgaccatgctaacagccctaacaagaagttctaccagtgagcaggcctcatgccntcgnctncagtnnnnnncannnnnnnnnnnnnnnnnnnnnnnnnngcnagtgnctnggttctnccaacagagtggtgtctagatttatcagagtaacgagaagacaaactccggcactgggtttgctccctgattaaagtgccttcagccaagaccatctctccctncctggtgaagtgtgacttcgaattagtttgcacttcctattggaaggtagagcccactgctcattgtataagccccgaggcctagagtggcagccaagagccatctgaagccacctctctgcctgttcctcccaagaggccagggtggccaggggtggtgagggcagttctgcacccagccaa

SEQ ID NO: 4536 - DNA, 185 bp, Homo sapiens
  misc_feature (73)..(73): n includes a, c, g, or t, or contains no nucleotide
  misc_feature (75)..(75): n includes a, c, g, or t, or contains no nucleotide
ggaactccagtctcacctcggcttgcaatggaccccaactgctcctgcgaggctggtggctcctgcgcctgcncnggctcctgcaagtgcaaaaagtgcaaatgcacctcctgcaagaagagctgctgctcctgttgccccctgggctgtgccaagtgtgcccagggctgcatctgcaaaggggc

SEQ ID NO: 4537 - DNA, 238 bp, Homo sapiens
cggagcagcgctcgcacaagaagggcgctggcgccaagaaggacaaaggcggcaaggccaagaagacggcggccgccgggggcaagaaggtgaagaaggcggccaagcccagcgtccccaaagtgcccaagggccgcaagtgagcgtgtcggccggtcagagcggccggcgtggacttttcggtgtttttgtttttctaccccaagtgacgtagattttgtacggctcacgccggccg

SEQ ID NO: 4538 - DNA, 493 bp, Homo sapiens
  misc_feature (37)..(73): n includes a, c, g, or t, or contains no nucleotide
  misc_feature (104)..(104): n includes a, c, g, or t, or contains no nucleotide
  misc_feature (106)..(166): n includes a, c, g, or t, or contains no nucleotide
  misc_feature (193)..(242): n includes a, c, g, or t, or contains no nucleotide
actggaactggcagagaaggctctggcttccaaacannnnnnnnnnnnnnnnnnnnnnnnnnnnnnnnnnnnngcaggaagaggacctggaaaccatgaccatncnnnnnnnnnnnnnnnnnnnnnnnnnnnnnnnnnnnnnnnnnnnnnnnnnnnnnnnnnnnnnaaattcatgaggaaaaggagcaactgnnnnnnnnnnnnnnnnnnnnnnnnnnnnnnnnnnnnnnnnnnnnnnnnnnaggcaggcagtccttgatggagatgcagagtcgtcatggggcgagaacaagtgactctgaccagcaggcttaccttgttcaaagaggagctgaggacagggactggcggcaacagcggaatattccgattcattcctgccccaagtgtggagaggttctgcctgacatagacacgttacagattcacgtgatggattgcatcatttaagtgttgatgtatcacctccccaaaactgttggtaaatgtcaga

SEQ ID NO: 4539 - DNA, 496 bp, Homo sapiens
  misc_feature (114)..(128): n includes a, c, g, or t, or contains no nucleotide
  misc_feature (166)..(201): n includes a, c, g, or t, or contains no nucleotide
  misc_feature (213)..(278): n includes a, c, g, or t, or contains no nucleotide
tgaaggcatctcgttcaggggcctttttatcattgatgataagggtattcttcggcagatcactgtaaatgacctccctgttggccgctctgtggatgagactttgagactagnnnnnnnnnnnnnnntcactgacaaacatggggaagtgtgcccagctggctgnnnnnnnnnnnnnnnnnnnnnnnnnnnnnnnnnnnncaaaagagcaannnnnnnnnnnnnnnnnnnnnnnnnnnnnnnnnnnnnnnnnnnnnnnnnnnnnnnnnnnnnnnnnnagccatgagaacaaaacctcttctgtattttttttttccattagtaaaacacaagacttcagattcagccgaattgtggtgtcttacaaggcaggcctttcctacagggggtggagagaccagcctttcttcctttggtaggaatggcctgagttggcgttgtgggcaggctactggtttgtatgatgtattagtagagcaacccattaatcttttgt

SEQ ID NO: 4540 - DNA, 494 bp, Homo sapiens
  misc_feature (63)..(83): n includes a, c, g, or t, or contains no nucleotide
tggaaaggccagctggcaagatgatggaagaaatctccattatggtagcctatgacgcccatnnnnnnnnnnnnnnnnnnnnngaagacttcctcactagtctggtggccatcagcaagcccaggtctatggtaccaaccaagaagctgaagaaatatgagaaagaatatcagacaatgcgagagagtcagctgcaacaggaagacccaatggatagatacaagtttgtatatttgtaggtaactccagctgttgcatttatactgggaatcttcataagaagctgagagaaagagaggggaaaaagaaagtggctttctactttcaaaaatgaaacaaaaaggaaaaatggcaaagtactgttttagctgtgcatgtcatatccacaaagacttttagcaggtgaactgttccaagactgacacaaggatgtttcaaacttgcctctgtctgtagaaaatgttaaaaataccaactcacttggaaggaaaaat

SEQ ID NO: 4541 - DNA, 587 bp, Homo sapiens
  misc_feature (211)..(211): n includes a, c, g, or t, or contains no nucleotide
  misc_feature (228)..(228): n includes a, c, g, or t, or contains no nucleotide
  misc_feature (255)..(255): n includes a, c, g, or t, or contains no nucleotide
  misc_feature (284)..(284): n includes a, c, g, or t, or contains no nucleotide
  misc_feature (292)..(293): n includes a, c, g, or t, or contains no nucleotide
  misc_feature (311)..(311): n includes a, c, g, or t, or contains no nucleotide
ctagtccgggacatccgacgacggggcaaaaacaaggtggcagcccagaactgccgcaagaggaagctggaaaccattgtgcagctggagcgggagctggagcggctgaccaatgaacgggagcggcttctcagggcccgcggggaggcagaccggaccctggaggtcatgcgccaacagctgacagagctgtaccgtgacattttccagncaccttcgggatgaatncaggcaacagctactctcctgaagagntacgcgctgcaacaggctgccgatggganccatcttnnccttgtgccccggggganccaagatggaggccacagactgagctggcccagaggggtggaactgctgatgggatttccttcattcccttctgataaaggtactccccaaccctgagtcccagaaggagctgagttctctagaccagaagaggatgacaatggcaacaagtgtttggaagttccaaggtgtgttcaaagaggcttgccttgagggagggctggaatctgtcttccctgactcggctcctcaggtctttagcctccaccttgtctaagctttggtctataaagtgc

SEQ ID NO: 4542 - DNA, 590 bp, Homo sapiens
  misc_feature (126)..(126): n includes a, c, g, or t, or contains no nucleotide
  misc_feature (142)..(156): n includes a, c, g, or t, or contains no nucleotide
  misc_feature (165)..(165): n includes a, c, g, or t, or contains no nucleotide
  misc_feature (167)..(167): n includes a, c, g, or t, or contains no nucleotide
  misc_feature (175)..(175): n includes a, c, g, or t, or contains no nucleotide
  misc_feature (179)..(179): n includes a, c, g, or t, or contains no nucleotide
  misc_feature (192)..(192): n includes a, c, g, or t, or contains no nucleotide
  misc_feature (202)..(202): n includes a, c, g, or t, or contains no nucleotide
  misc_feature (206)..(207): n includes a, c, g, or t, or contains no nucleotide
  misc_feature (212)..(213): n includes a, c, g, or t, or contains no nucleotide
  misc_feature (222)..(222): n includes a, c, g, or t, or contains no nucleotide
  misc_feature (230)..(230): n includes a, c, g, or t, or contains no nucleotide
  misc_feature (234)..(234): n includes a, c, g, or t, or contains no nucleotide
  misc_feature (238)..(238): n includes a, c, g, or t, or contains no nucleotide
  misc_feature (282)..(282): n includes a, c, g, or t, or contains no nucleotide
  misc_feature (395)..(410): n includes a, c, g, or t, or contains no nucleotide
gaatacttctggaagcttaacaaaactaaccctgctgtcctttttattgtttttaattaatatttttgttttaattgatagcaaaatagtttatgggtttggaaacttgcatgaaaatattttagnccccctcagatgttcnnnnnnnnnnnnnnntcatcctancngaagtaanccgncaaaactctagangggggagttngagnncaggnncgccagggnctgtcatncaancatnggatatgacatttcacaacagtgactagttgaatcccttgtaancgtagtagttgtctgctctttgtccatgtgttaatgaggactgcaaagtcccttctgttgtgattcctaggacttttcctcaagaggaaatctggatttccacctaccgcttnnnnnnnnnnnnnnnncacctacttactgtattctacattattatatgacatagtataatgagacaatatcaaaagtaaacatgtaatgacaatacatactaacattcttgtaggagtggttagagaagctgatgcctcatttctacattctgtcattagctattatcatctaacgtttcagtgtatccttacaga

SEQ ID NO: 4543 - DNA, 183 bp, Homo sapiens
actagcaagatgaacctctctgaggaggttgacttggaagactatgtggcccggccagataagatttcaggagctgatattaactccatctgtcaggagagtggaatgttggctgtccgtgaaaaccgctacattgtcctggccaaggacttcgagaaagcatacaagactgtcatcaagaag

SEQ ID NO: 4544 - DNA, 373 bp, Homo sapiens
  misc_feature (111)..(127): n includes a, c, g, or t, or contains no nucleotide
  misc_feature (129)..(129): n includes a, c, g, or t, or contains no nucleotide
  misc_feature (131)..(137): n includes a, c, g, or t, or contains no nucleotide
  misc_feature (139)..(139): n includes a, c, g, or t, or contains no nucleotide
  misc_feature (141)..(141): n includes a, c, g, or t, or contains no nucleotide
  misc_feature (143)..(143): n includes a, c, g, or t, or contains no nucleotide
  misc_feature (228)..(228): n includes a, c, g, or t, or contains no nucleotide
  misc_feature (251)..(251): n includes a, c, g, or t, or contains no nucleotide
catcgacgtctatggaattaagtgccatgaaaactcgcctaggaaggaggtgtacttcatggcaattattgacatccttactcattatgatgcaaaaaagaaagctgcccnnnnnnnnnnnnnnnnnanannnnnnngngngnagatctccaccgtgaacccagaacagtattcaaagcgctttttggactttattggccacatcttgacgtaacctcctgcgcagcntcggacagacatgaacattgganggacagaggtggcttcggtgtaggaaaaatgaaaaccaaactcagtgaagtactcatcttgcaggaagcaaacctccttgtttacatcttcaggccaagatgactgatttgggggctactcg

SEQ ID NO: 4545 - DNA, 387 bp, Homo sapiens
  misc_feature (27)..(45): n includes a, c, g, or t, or contains no nucleotide
cagtctgcgtcctgggtctgctaggtnnnnnnnnnnnnnnnnnnngtatctgcatccggtgcaagttttagctggcagaggtgagaccggtggtgctggtctgcctttgccaactatagccagtctggagacttgataaaatacttcagtgagaccagcttctcatcaacttgggcccggcgtgctgggcctgaaagtcacactacatgcactgcctttgggagtcagctcactccctgctcccacctggaaccttgccagcgtgaaggaggcttccaggtacttcaccctgtcaaccacctctgaatccccaccaggcgccttcctgggtggattcaacaagatgattttgccctttcccagttctctccttcactttggcatcag

SEQ ID NO: 4546 - DNA, 348 bp, Homo sapiens
  misc_feature (64)..(107): n includes a, c, g, or t, or contains no nucleotide
  misc_feature (224)..(224): n includes a, c, g, or t, or contains no nucleotide
  misc_feature (241)..(255): n includes a, c, g, or t, or contains no nucleotide
tgcttactgactaccggggccacacggctgagatcctggactttgccctcagcaaagatgcctnnnnnnnnnnnnnnnnnnnnnnnnnnnnnnnnnnnnnnnnnnnntgtgtccaaaggcctgaccgttaatggctgcagcccctgcctgtgtgtctggtgttgaggggacgaagggacccctgcccctgtctgccagcagaggcagtagggcacagagggaanaggagggtggggccctnnnnnnnnnnnnnnnctcttcaactgacttgctcccctctccttttcttctctttagagacccagcccagggccctcccacccttgcccagacctggtgggcccttca

SEQ ID NO: 4547 - DNA, 522 bp, Homo sapiens
  misc_feature (238)..(240): n includes a, c, g, or t, or contains no nucleotide
  misc_feature (243)..(243): n includes a, c, g, or t, or contains no nucleotide
  misc_feature (315)..(315): n includes a, c, g, or t, or contains no nucleotide
  misc_feature (403)..(426): n includes a, c, g, or t, or contains no nucleotide
  misc_feature (428)..(439): n includes a, c, g, or t, or contains no nucleotide
  misc_feature (441)..(445): n includes a, c, g, or t, or contains no nucleotide
  misc_feature (447)..(447): n includes a, c, g, or t, or contains no nucleotide
tagttttgcagtttgactttacgtcttatacatcttagttacaagtctttggaaactcttgtttacttatgagcataatcattccttggagttatactaactaataatgaatattaaatgatttttcttcagtcacagtgagagcatcttgctttgtggttgaaataggtagtgtatgtcagtctttgctttaggctgtttctcatctaagtgtttgaattaaagatgttaaattttnnnaantgtgaaaaatatgttttctgtatcgacacattttattaaacttggcttgattgcttctttatagtagtcccngtaagtggacataaatgtggctatttgatgttaatgcaactatgtcaaggctgcaatccctttaatagtttctttttagcaaataaannnnnnnnnnnnnnnnnnnnnnnnannnnnnnnnnnnannnnnanagctctactacttcatttccccagtaagcatatatataatgatcccttttgagtttatccccagtaccattgatc

SEQ ID NO: 4548 - DNA, 312 bp, Homo sapiens
  misc_feature (65)..(96): n includes a, c, g, or t, or contains no nucleotide
  misc_feature (184)..(227): n includes a, c, g, or t, or contains no nucleotide
  misc_feature (235)..(235): n includes a, c, g, or t, or contains no nucleotide
  misc_feature (245)..(245): n includes a, c, g, or t, or contains no nucleotide
  misc_feature (267)..(283): n includes a, c, g, or t, or contains no nucleotide
tttctaggactcaagcagcaagccaggattctaggttggctgctgtgtcatctttgaagtcaagnnnnnnnnnnnnnnnnnnnnnnnnnnnnnnnnctcgttttgataatacttcagaatagggaactcatgtgaatactactatgtagaaataaaacctagaccttgagcgaacatctgtatnnnnnnnnnnnnnnnnnnnnnnnnnnnnnnnnnnnnnnnnnnnntttgatgntttggaaaanttccagtaattatcatttttgnnnnnnnnnnnnnnnnnacatagtactttggtgttacctgcttttg

SEQ ID NO: 4549 - DNA, 209 bp, Homo sapiens
  misc_feature (82)..(140): n includes a, c, g, or t, or contains no nucleotide
ctacgactgccaggaagaggagatctcagaactagagattgacgtggatgagctcctggacatggagagtgacgatgcctgnnnnnnnnnnnnnnnnnnnnnnnnnnnnnnnnnnnnnnnnnnnnnnnnnnnnnnnnnnnctggcctgctggacaagatccgggccatgcagaagctgagcacaccccagaagaaaccagcattctcga

SEQ ID NO: 4550 - DNA, 513 bp, Homo sapiens
  misc_feature (33)..(33): n includes a, c, g, or t, or contains no nucleotide
  misc_feature (37)..(37): n includes a, c, g, or t, or contains no nucleotide
  misc_feature (97)..(163): n includes a, c, g, or t, or contains no nucleotide
  misc_feature (172)..(188): n includes a, c, g, or t, or contains no nucleotide
  misc_feature (217)..(232): n includes a, c, g, or t, or contains no nucleotide
  misc_feature (276)..(294): n includes a, c, g, or t, or contains no nucleotide
  misc_feature (451)..(465): n includes a, c, g, or t, or contains no nucleotide
ccgatgttggctatgaagctattggtcttgtgnacantagtttgcccacagttggtgtttttgcaaaagcaactgcacaagacaaccccaaatctgnnnnnnnnnnnnnnnnnnnnnnnnnnnnnnnnnnnnnnnnnnnnnnnnnnnnnnnnnnnnnnnnnnntattcctcnnnnnnnnnnnnnnnnnccacaggctcccgtccagggggaggactnnnnnnnnnnnnnnnntcttctacctcagggacaaagtggtcgtggggattgtgctatgnnnnnnnnnnnnnnnnnnnccaatagcaaggaagatcattaaggacggtgagcagcatgaagatctcaatgaagtagccaaactattcaacattcatgaagactgaagccccacagtggaattggcaaacccactgcagcccctgagaggaggtcgaatgggtaaaggagcatttnnnnnnnnnnnnnnntttctctgtgtatgagtgtgaatgatcaagtcctttgtgaatattttc

SEQ ID NO: 4551 - DNA, 76 bp, Homo sapiens
agcaatggctactagaaggacgaacaattgccctcctttggaagtacggctaatagaagccctagatccgaataag

SEQ ID NO: 4552 - DNA, 588 bp, Homo sapiens
aaagtgctcggagagctcggacagcggctccgggttctggaaggccctgaccttcatggccgtcggaggaggactcgcagtcgccgggctgcccgcgctgggcttcaccggcgccggcatcgcggccaactcggtggctgcctcgctgatgagctggtctgcgatcctgaatgggggcggcgtgcccgccggggggctagtggccacgctgcagagcctcggggctggtggcagcagcgtcgtcataggtaatattggtgccctgatgcggtacgccacccacaagtatctcgatagtgaggaggatgaggagtagccagcagctcccagaacctcttcttccttcttggcctaactcttccagttaggatctagaactttgcctttttttttttttttttttttttttgagatgggttctcactatattgtccaggctagagtgcagtggctattcacagatgcgaacatagtacactgcagcctccaactcctagcctcaagtgatcctcctgtctcaacctcccaagtaggattacaagcatgcgccgacgatgcccagaatccagaactttgtctatcactctc

SEQ ID NO: 4553 - DNA, 487 bp, Homo sapiens
acagcataagccttatcctgccagccaaggggatttattctaagagaagtgcatgtgaagaatggttgccactgttattagattgacaagatgttaatttctctgtaggttgtaactttaaaaataaatgaaattatttaagggttatgctgcactagtattccttagaggaaacagttctttaaagttaggaaagggagtaggcaggcatgtgttggcaaaggctgttaatagtagttaagtgttaagactgcttttctttaacgttttcatggtaatgcatatttagagcactgtatttttgtcttgttaagaaaatttagcatttctaaaagaaaaaagcaaccctctttcaaactgttaattctgtcacagcctgtatattttagtcatttgtaaatctcttcatacaatagtgacttcttttttgactgatacagtatcttaattacaaggttattttgtacttgtcttaatacactaagtg

SEQ ID NO: 4554 - DNA, 382 bp, Homo sapiens
  misc_feature (30)..(30): n includes a, c, g, or t, or contains no nucleotide
  misc_feature (39)..(39): n includes a, c, g, or t, or contains no nucleotide
  misc_feature (54)..(54): n includes a, c, g, or t, or contains no nucleotide
gtttcagaaattctcacttttgttgactgnccaacatancaaagtaagggaaanctcaagatattaagatggctgtatcagttcttaaaatctgcagagcctggttcaaaatcagtcactcccttcagaagcagacatggcatctgttccttgcttgcttgttggttgtgtacctttcacgagacctgaattttagaattgcccagtgctgccagagtgagtgagtgtaattctcctttcaggtaaagataggctatctcaacactgctgagtgattcataaacatatcaaccaatagcattaacccattttatttcctgtccttagtgtctgaagatgctcaccagttttctgtgtacagtaaggcagcatgctaaaatgc

SEQ ID NO: 4555 - DNA, 441 bp, Homo sapiens
  misc_feature (238)..(241): n includes a, c, g, or t, or contains no nucleotide
  misc_feature (245)..(245): n includes a, c, g, or t, or contains no nucleotide
  misc_feature (248)..(248): n includes a, c, g, or t, or contains no nucleotide
  misc_feature (252)..(252): n includes a, c, g, or t, or contains no nucleotide
  misc_feature (254)..(274): n includes a, c, g, or t, or contains no nucleotide
  misc_feature (276)..(278): n includes a, c, g, or t, or contains no nucleotide
tgaggcaacgtgagaacaggctatgggaaggctgcaaaggctgagaaatgcaaaggctcatatttataaatcccacccccagagtggggagggtcaggtgccagacctggactaaactgcaccaaggaaacacccagcagggtctcctgtgagccggggaccatgcagcccgaaacctccagtcactgcgcccggcaggagtcaggagccagggactgtgcagcctggaacctccagnnnntgtnccnagcnannnnnnnnnnnnnnnnnnnnngnnntcaggctaagaaacgccaggtctgcctgttcttgctgggcaatggctgatggctgccagtttctgctgatacacaggtaggatgggacccttcatgaatatctgactttaataagttggtaaggatatatttttttgtctatgttctgtttcaacttatgtag

SEQ ID NO: 4556 - DNA, 106 bp, Homo sapiens
cactaccagtaaaattactattaataatttagtaaatataaatttaaaaatttagtaaatatcagacagtctttatgtctctctcactcttgacatacatatacat

SEQ ID NO: 4557 - DNA, 239 bp, Homo sapiens
  misc_feature (145)..(145): n includes a, c, g, or t, or contains no nucleotide
tatttaggttctagatcggtccacgaaagttagcccatatgtatatcttgaatagtataggggagggtattcataaagtccttatgtggttttaactaagtgaaattatggacaagagaaataattgtaaaatcgtcttaaaggnaaatttaatttttactcctgtttatgggacattcgttctattaactgtcagacacaatttctgttttcatctgagagccagttttcctttattt

SEQ ID NO: 4558 - DNA, 198 bp, Homo sapiens
  misc_feature (26)..(99): n includes a, c, g, or t, or contains no nucleotide
ctttcttgaccagctttccctggtgnnnnnnnnnnnnnnnnnnnnnnnnnnnnnnnnnnnnnnnnnnnnnnnnnnnnnnnnnnnnnnnnnnnnnnnnnntttgcgtctccttgtaggcagtgcgtccatccttccctagggcaggaattcccacagttgctactttcctgggagggcctcatgttttatctggttctt

SEQ ID NO: 4559 - DNA, 550 bp, Homo sapiens
  misc_feature (249)..(263): n includes a, c, g, or t, or contains no nucleotide
ctaacagtgtcactctttgggaggtggtacacaaaggactcactttacagctcatgtgggaccagcaattcagcaataacttacctgctaatattcatattattaatgatcatagctttgcaaaatattgtaatgttatagggcgtctctttatcactcagcttctgcatcatatgcttggctgaatgtgtttatcggcttcccaagtttactaagaaactttgaagggctatttcagtagtatagacnnnnnnnnnnnnnnnattttttctcatcaataattattttttaagtattatgataatgttgtccatttttttggctactctgaaatgttgcagtgtggaacaatggaaagagcctgggtgtttgggtcagataaatgaagatcaaactccagctccagcctcatttgcttgagactttgtgtgtatgggggacttgtatgtatgggagtgaggagtttcagggccattgcaaacatagctgtgcccttgaagagaatagtaatgatgggaatttagaggtttatgactgaattccctttgac

SEQ ID NO: 4560 - DNA, 166 bp, Homo sapiens
ctctgtgcagtcactggaggttgaagccaagtggggtgctgggaggagggagagggaggtcactggaaaggggagagcctgctggcacccaccgtggaggaggaaggcaagagggggtggaggggtgtggcagtggttttggcaaacgctaaagagcccttgcctc

SEQ ID NO: 4561 - DNA, 376 bp, Homo sapiens
  misc_feature (95)..(98): n includes a, c, g, or t, or contains no nucleotide
  misc_feature (184)..(184): n includes a, c, g, or t, or contains no nucleotide
  misc_feature (339)..(341): n includes a, c, g, or t, or contains no nucleotide
  misc_feature (343)..(343): n includes a, c, g, or t, or contains no nucleotide
gatgcctgagccagccaagtctgctcccgccccgaagaagggctccaagaaggcagtgaccaaagcgcagaagaaagatggcaagaagcgcaagnnnngccgcaaggagagttactctgtgtacgtgtacaaggtgctgaaacaggtccatcccgacactggcatctcttccaaggccatgggnatcatgaattctttcgttaacgacatatttgagcgcatcgcgggcgaggcttcccgcctggcgcattacaacaagcgctcgaccatcacctccagggagatccagacggccgtgcgcctgctgcttcccggagagctggccaagcacgccgtgtnnngnagggcaccaaggccgtcaccaagtacaccagct

SEQ ID NO: 4562 - DNA, 181 bp, Homo sapiens
gttaagttcagcacttgtctcattttaatgtaaagatttgcttccattttcctacaggcagtctctctcttcctcacagtcccactgtgcaggtgctattgttactcttacgaatattttcagtaatgttattttcttctaagtgaaatttctagcctgcactttgatgtcatgtgttccc

SEQ ID NO: 4563 - DNA, 539 bp, Homo sapiens
  misc_feature (95)..(95): n includes a, c, g, or t, or contains no nucleotide
  misc_feature (343)..(344): n includes a, c, g, or t, or contains no nucleotide
tgcagctgactatgtattcctgaactggagccccagacccgccccctcaccgccttgctataggagtcacctggagcctcggtctctcccagggnccgatcctgtctgcagtcacatctttgtggggcctgctgacccacaagcttttgttctctcagtacttgttacccagcttctcaacatccagggcccaatttgccctgcctggagttccccctggctctaggacactctaacaagctctgtccacgggtctccccattcccaccaggccctgcacacacccactccgtaacctctcccctgtacctgtgccaagcctagcacttgtgatgcctccatnnccccgagggccctctctcagttctgggaggatgactccagtccctgcacgccctggcacacccttcacggttgctacccaggcggccaagctccagaccgtgccagacccaggtgccccagtgcctttgtctatattctgctcccagcctgccaggcccaggaggaaataaacatgccccagttgctgatctcta

SEQ ID NO: 4564 - DNA, 357 bp, Homo sapiens
  misc_feature (36)..(36): n includes a, c, g, or t, or contains no nucleotide
  misc_feature (221)..(237): n includes a, c, g, or t, or contains no nucleotide
aaaggaagctgcagatcggggtcaagaagcgggtgnaccactgtcccatcaaatcgcgcaaaggggatgtcctgcacatgcactacacggggaagctggaagatgggacagagtttgacagcagcctgccccagaaccagccctttgtcttctcccttggcacaggccaggtcatcaagggctgggaccaggggctgctggggatgtgtgagggggaaaannnnnnnnnnnnnnnnncatccgagctagggtatggagagcggggagctcccccaaagattccaggcggtgcaaccctggtgttcgaggtggagctgctcaaaatagagcgacgaactgagctgtaaccagactggg

SEQ ID NO: 4565 - DNA, 368 bp, Homo sapiens
  misc_feature (60)..(92): n includes a, c, g, or t, or contains no nucleotide
  misc_feature (97)..(113): n includes a, c, g, or t, or contains no nucleotide
  misc_feature (202)..(202): n includes a, c, g, or t, or contains no nucleotide
  misc_feature (204)..(221): n includes a, c, g, or t, or contains no nucleotide
  misc_feature (243)..(291): n includes a, c, g, or t, or contains no nucleotide
gatccatttccatcggtccttacagccgctcgtcagactccagcagccaagatggtgaannnnnnnnnnnnnnnnnnnnnnnnnnnnnnnnncttgnnnnnnnnnnnnnnnnnaaacttgtagtagttgacttctcagccacgtggtgtgggccttgcaaaatgatcaagcctttctttcattccctctctgaaaagtattncnnnnnnnnnnnnnnnnnntgaagtagatgtggatgactgnnnnnnnnnnnnnnnnnnnnnnnnnnnnnnnnnnnnnnnnnnnnnnnnngttttttaagaagggacaaaaggtgggtgaattttctggagccaataaggaaaagcttgaagccaccattaatgaat

SEQ ID NO: 4566 - DNA, 580 bp, Homo sapiens
  misc_feature (26)..(42): n includes a, c, g, or t, or contains no nucleotide
  misc_feature (484)..(484): n includes a, c, g, or t, or contains no nucleotide
  misc_feature (486)..(503): n includes a, c, g, or t, or contains no nucleotide
  misc_feature (505)..(512): n includes a, c, g, or t, or contains no nucleotide
  misc_feature (514)..(517): n includes a, c, g, or t, or contains no nucleotide
  misc_feature (519)..(520): n includes a, c, g, or t, or contains no nucleotide
ccgcaactcgcttgtccttgggtcannnnnnnnnnnnnnnnnatgtgcttgtccctgtgctcccacggttcccaggggccaggctgggagcccacagccaccccactatgccgcaggccgccctacccaccttcaggcagcctatgggacgcagggccccatctgtccctcggtcgccgtgtggccagagtgggtccgtcgtccccaacactcgtgctcgctcagacactttggcaggatgtctggggcctcaccagcaggagcgcgtgcaagccgggcaggcggtccacctagacccacagcccctcgggagcaccccacctctgtgtgtgatgtagctttctctccctcagcctgcaagggtccgatttgccatcgaaaaagacaacctctacttttttcttttgtattttgataaacactgaagctggagctgttaaatttatcttggggaaacctcagaactggtctatttggtgtcgtngnnnnnnnnnnnnnnnnnnannnnnnnntnnnnanncaactgttttgtatacttgttttcagttttcatttcgacaaacaagcactgtaattatag

SEQ ID NO: 4567 - DNA, 563 bp, Homo sapiens
  misc_feature (50)..(50): n includes a, c, g, or t, or contains no nucleotide
  misc_feature (294)..(294): n includes a, c, g, or t, or contains no nucleotide
  misc_feature (326)..(326): n includes a, c, g, or t, or contains no nucleotide
  misc_feature (331)..(331): n includes a, c, g, or t, or contains no nucleotide
  misc_feature (336)..(337): n includes a, c, g, or t, or contains no nucleotide
  misc_feature (340)..(342): n includes a, c, g, or t, or contains no nucleotide
  misc_feature (464)..(464): n includes a, c, g, or t, or contains no nucleotide
  misc_feature (518)..(521): n includes a, c, g, or t, or contains no nucleotide
  misc_feature (523)..(525): n includes a, c, g, or t, or contains no nucleotide
  misc_feature (528)..(528): n includes a, c, g, or t, or contains no nucleotide
acttggccgggaagacagagcaagccaaggctgacctggcccggctggcnatcatccggaaacagcgggaggaggctgcccggaagaaggaagaggaaaggaaagcaaaagacgatgccacattgtcaggaaaacgaatgcagtcactctccctgaataagtaactgcgacccgtgggaggagatgccggggacctgggccgcgctgccaggacctctgctgtgtctcgcccaccctgtgccctggcgccgctgcaacagcccctcatggccaggagccccccatggcctgggncctcctcttcatcttggcacagaaattgtttnggggntgggnnggnnnactgggggaggggtagctgctatctttgagacagaaagatgcaggacagcatttcatatgtaaccatttgaatgtttttgctgtttttagaattcagagcccttgctggggggtgcctgggnagatggggtaagaagagctttcatttgtctggtagatagatagcatgtaagggnnnngnnntcncaggaggcagctgctgacaggcaaaacatgctcca

SEQ ID NO: 4568 - DNA, 593 bp, Homo sapiens
  misc_feature (84)..(84): n includes a, c, g, or t, or contains no nucleotide
  misc_feature (196)..(196): n includes a, c, g, or t, or contains no nucleotide
  misc_feature (207)..(228): n includes a, c, g, or t, or contains no nucleotide
  misc_feature (236)..(250): n includes a, c, g, or t, or contains no nucleotide
tcaagaccaagttcctctctgagatcgaaagtgacagcctggccctgcggcaggtccgagccatcctagaggatctggggctanccctgacctcagatgacgccctgatggtgctagaggtgtgccaggctgtgtcccagagggctgcccagctctgtggggcgggtgtagctgccgtggtggagaagatccgggngaaccggggcnnnnnnnnnnnnnnnnnnnnnntgggggtnnnnnnnnnnnnnnncaagctgcacccgcgcttctccagcctggtggcggccacagtgcgggagctggcccctcgctgtgtggtcacgttcctgcagtcagaggatgggtccggcaaaggtgcggccctggtcaccgctgttgcctgccgccttgcgcagttgactcgtgtctgaggaaacctccaggctgaggaggtctccgccgcagccttgctggagccgggtcggggtctgcctgtttcccagccaggcccagccacccaggactcctgggacatcccatgtgtgacccctctgcggccatttggccttgctccctggctttccctgagagaagtagcactcaggttagcaata

SEQ ID NO: 4569 - DNA, 358 bp, Homo sapiens
  misc_feature (47)..(51): n includes a, c, g, or t, or contains no nucleotide
  misc_feature (107)..(108): n includes a, c, g, or t, or contains no nucleotide
  misc_feature (136)..(136): n includes a, c, g, or t, or contains no nucleotide
  misc_feature (138)..(138): n includes a, c, g, or t, or contains no nucleotide
  misc_feature (141)..(141): n includes a, c, g, or t, or contains no nucleotide
  misc_feature (144)..(145): n includes a, c, g, or t, or contains no nucleotide
  misc_feature (147)..(148): n includes a, c, g, or t, or contains no nucleotide
  misc_feature (150)..(229): n includes a, c, g, or t, or contains no nucleotide
  misc_feature (268)..(283): n includes a, c, g, or t, or contains no nucleotide
aagctgcggcgctcctttatctgatgtggtttagtaaaagcctcccnnnnncctccccgtggcctgggacgtggctggtagtgtttgtgtgggaagcagctcaaganncggaccgcgtgacattaaggagagcgcnanggnggnncnngnnnnnnnnnnnnnnnnnnnnnnnnnnnnnnnnnnnnnnnnnnnnnnnnnnnnnnnnnnnnnnnnnnnnnnnnnnnnnnnnatgaatgtagacacaaaacagcaacacttgtatgaagannnnnnnnnnnnnnnntatttttttcctgtttcctttccttttttttaaaaaatctgaattgtgccctgtactgcagttacttgtttgaat

SEQ ID NO: 4570 - DNA, 230 bp, Homo sapiens
  misc_feature (91)..(123): n includes a, c, g, or t, or contains no nucleotide
ttataccctttttggcctgaagacattttagaatttcctaacagagtttactgttgtttagaaatttgcaagggcttcttttccgcaaatnnnnnnnnnnnnnnnnnnnnnnnnnnnnnnnnntattatctctaattagtgccaccagactagacctgtatcattcatggtataaattttactcttgcaacataactaccatctctctcttaaaacgagatcaggttagc

SEQ ID NO: 4571 - DNA, 543 bp, Homo sapiens
  misc_feature (176)..(243): n includes a, c, g, or t, or contains no nucleotide
ctagccagaagtggaattggcagcttctagaatatgtacacctctggacaaaatgttcctcaatcttaagatacaaagaccctcattgtctgggtctattcccacacttactgagtacagatgaaggaaagtggtagcaatttaatcataactttcatttgctgaaaaacattatnnnnnnnnnnnnnnnnnnnnnnnnnnnnnnnnnnnnnnnnnnnnnnnnnnnnnnnnnnnnnnnnnnnnaacattacattcaggggatttcctctggctcagtcttttccccttgaagttctctaatagatgttacttttgacaaaagatcgcctatgagttacaagcaccaggggatgctctacatcaagggatgcaccttcagtcaaactgtcaaaaagcccagaattcccaaaggcattaggtttcccaactgctttgtgctgatatcagaacagcagaaattaaatgtgaaatgtttctgatgacttatgttctacaatctatggacatacgggatttttttttcttgctttgaagctacctgga

SEQ ID NO: 4572 - DNA, 476 bp, Homo sapiens
  misc_feature (53)..(53): n includes a, c, g, or t, or contains no nucleotide
  misc_feature (55)..(55): n includes a, c, g, or t, or contains no nucleotide
  misc_feature (63)..(64): n includes a, c, g, or t, or contains no nucleotide
  misc_feature (68)..(69): n includes a, c, g, or t, or contains no nucleotide
  misc_feature (73)..(73): n includes a, c, g, or t, or contains no nucleotide
  misc_feature (161)..(189): n includes a, c, g, or t, or contains no nucleotide
  misc_feature (378)..(378): n includes a, c, g, or t, or contains no nucleotide
  misc_feature (434)..(434): n includes a, c, g, or t, or contains no nucleotide
tgtctgatctgtgctttccagctcaccccccacactcactcctgagacccctngncctccggnntcannctcncagcctctgttcccctagtaagtgccttccatgtcggcctctaaccccaggccccgaggacccagacccagtggggaggcggacgttnnnnnnnnnnnnnnnnnnnnnnnnnnnnncctgtcctcctggtgggtccaggggcccctccagcttgtggagccccacactggggtgccgcctgcccgtctctctcccatggagccccagccccctttgggcccagggacaccagccaggctctgtgctgaccctcctgttgcacccagccctggtctcagcagcgaccacccctgcctccaccctcngagctttgcatgttccactaaccccgggcgggtggcaggtggaggtgtcaggctgntggcgcctctgcaagggcagaacactaacctgaccgtgggcg

SEQ ID NO: 4573 - DNA, 386 bp, Homo sapiens
  misc_feature (54)..(57): n includes a, c, g, or t, or contains no nucleotide
  misc_feature (59)..(223): n includes a, c, g, or t, or contains no nucleotide
gcccatgcttcgacggggcagcagcaagtggatggccaggacaggggtgttccnnnncnnnnnnnnnnnnnnnnnnnnnnnnnnnnnnnnnnnnnnnnnnnnnnnnnnnnnnnnnnnnnnnnnnnnnnnnnnnnnnnnnnnnnnnnnnnnnnnnnnnnnnnnnnnnnnnnnnnnnnnnnnnnnnnnnnnnnnnnnnnnnnnnnnnnnnnnnnnnnnnnnnnnnacagccaatagccgtcctcatgtacgtccacgactactacgtgctcaactatgaggccccagcggcagaggcctgagctgcacctgagggcctggcttctcactgccacctcacacccgctgccagagcccacctctcctcctaggcctcgagtgctggggat

SEQ ID NO: 4574 - DNA, 551 bp, Homo sapiens
  misc_feature (59)..(60): n includes a, c, g, or t, or contains no nucleotide
  misc_feature (63)..(63): n includes a, c, g, or t, or contains no nucleotide
  misc_feature (226)..(277): n includes a, c, g, or t, or contains no nucleotide
  misc_feature (298)..(321): n includes a, c, g, or t, or contains no nucleotide
  misc_feature (417)..(417): n includes a, c, g, or t, or contains no nucleotide
  misc_feature (466)..(466): n includes a, c, g, or t, or contains no nucleotide
  misc_feature (490)..(522): n includes a, c, g, or t, or contains no nucleotide
agttcccggccatccagaatctagcgctgcgcaacacaggaatggagacgcccacaggnngtntgcgccgcactggcggcggcaggtgtgcagccccacagcctagacctcagccacaactcgctgcgcgccaccgtaaaccctagcgctccgagatgcatgtggtccagcgccctgaactccctcaatctgtcgttcgctgggctggaacaggtgcctaaaggannnnnnnnnnnnnnnnnnnnnnnnnnnnnnnnnnnnnnnnnnnnnnnnnnnnagggcgccgcagcctgacgannnnnnnnnnnnnnnnnnnnnnnncactggacgggaatcccttcctggtccctggaactgccctcccccacgagggctcaatgaactccggcgtggtcccagcctgtgcacgttcgaccntgtcggtgggggtgtcgggaaccctggtgctgctccaaggggcccgggnctttgcctaagatccaagacagannnnnnnnnnnnnnnnnnnnnnnnnnnnnnnnngggagtcccgtcaggacgttgaggacttt

SEQ ID NO: 4575 - DNA, 371 bp, Homo sapiens
  misc_feature (48)..(48): n includes a, c, g, or t, or contains no nucleotide
  misc_feature (71)..(72): n includes a, c, g, or t, or contains no nucleotide
  misc_feature (74)..(74): n includes a, c, g, or t, or contains no nucleotide
  misc_feature (76)..(85): n includes a, c, g, or t, or contains no nucleotide
  misc_feature (87)..(101): n includes a, c, g, or t, or contains no nucleotide
  misc_feature (103)..(103): n includes a, c, g, or t, or contains no nucleotide
  misc_feature (105)..(105): n includes a, c, g, or t, or contains no nucleotide
  misc_feature (107)..(124): n includes a, c, g, or t, or contains no nucleotide
  misc_feature (219)..(220): n includes a, c, g, or t, or contains no nucleotide
  misc_feature (288)..(316): n includes a, c, g, or t, or contains no nucleotide
gttgttttactatcctcaggcatccattccaatcaagaaatgatggtnctctgcatcagtggttcagagcnngntnnnnnnnnnngnnnnnnnnnnnnnnntngnannnnnnnnnnnnnnnnnnccctatctcaaacttgaatcaaaatttctggggtgtgggcacaataatctgtaattttctttgtttatacttcccctgatgccactggttccgannccactggctggggggcctgctttgaaatgcttgtctgcagagtcacagcagccatgaaaaccttatgnnnnnnnnnnnnnnnnnnnnnnnnnnnnnttgttgacattcatgtctctgagttacaaaagtgctaattcactacatgtaattg

SEQ ID NO: 4576 - DNA, 484 bp, Homo sapiens
  misc_feature (70)..(71): n includes a, c, g, or t, or contains no nucleotide
  misc_feature (106)..(107): n includes a, c, g, or t, or contains no nucleotide
  misc_feature (148)..(149): n includes a, c, g, or t, or contains no nucleotide
  misc_feature (176)..(209): n includes a, c, g, or t, or contains no nucleotide
cttcgctcagatgagatgagatatgatttcctagagatgtaaaaataagaatgaatgtggcgcccccttnnttccagatgtaatagaaagctctgccctatcacannggggggtgttgaagcgccccttgtgttttaactgtatttannctgagcacaagatgcacaagctgtggnnnnnnnnnnnnnnnnnnnnnnnnnnnnnnnnnntgcagatcgcagacctgtttccaggctgatgtttctggtgtgtaattgctagcgtttctgaagggttttcccaattgttttagccttgtgaagtattcttaattataacttgcctttcagcgatggtacatgacttgattcaacgtttggttctgaacttacacactgatgcgtttactcatctaacataatctgacagggcctcagcaagggagccatacatttttgtaacattttgatatgttttaatgcatctgacttagatcttactgaaa

SEQ ID NO: 4577 - DNA, 455 bp, Homo sapiens
  misc_feature (377)..(391): n includes a, c, g, or t, or contains no nucleotide
atgaccaatacagtcactaggttgtagttttttttaaataaaggaaaagcagtattgtcctggttttaaacctatgatggaattctaatgtcattattttaatggaatcaatcgaaatatgctctatagagaatatatcttttatatattgctgcagtttccttatgttaatcctttaacactaaggtaacatgacataatcataccatagaagggaacacaggttaccatattggtttgtaatatgggtcttggtgggttttgttttatcctttaaattttgttcccatgagttttgtggggatggggattctggttttattagctttgtgtgtgtcctcttcccccaaacccccttttggtgagaacatcccctnnnnnnnnnnnnnnncttgacctcggataacaataagagagctcatctcatttttacttttgaacgttggccttacaat

SEQ ID NO: 4578 - DNA, 295 bp, Homo sapiens
  misc_feature (34)..(34): n includes a, c, g, or t, or contains no nucleotide
  misc_feature (61)..(61): n includes a, c, g, or t, or contains no nucleotide
  misc_feature (104)..(167): n includes a, c, g, or t, or contains no nucleotide
  misc_feature (220)..(221): n includes a, c, g, or t, or contains no nucleotide
  misc_feature (265)..(265): n includes a, c, g, or t, or contains no nucleotide
cacggacggtgcaataccgaacgcagggggcggnggaagctgccaaggttggggctttggnatccctcattcgatccgtggcctccttctccatctacagtccnnnnnnnnnnnnnnnnnnnnnnnnnnnnnnnnnnnnnnnnnnnnnnnnnnnnnnnnnnnnnnnngaagatgcagaaatgatgtcaagaatggcttctcatgggatcaaaattgtcanncagctaaagatgggggcaaagacctacccagatactgattcctncaacactgtagcagagatcactgggagtag

SEQ ID NO: 4579 - DNA, 577 bp, Homo sapiens
  misc_feature (523)..(545): n includes a, c, g, or t, or contains no nucleotide
cattcctgatttttgtctgatgtgaaaaagccttggtattttacattttgaaaattcaaagaagcttaatataaaagtttgcattctactcaggaaaaagcatcttcttgtatatgtcttaaatgtatttttgtcctcatatacagaaagttcttaattgattttacagtctgtaatgcttgatgttttaaaataataacatttttatattttttaaaagacaaacttcatattatcctgtgttctttcctgactggtaatattgtgtgggatttcacaggtaaaagtcagtaggatggaacattttagtgtatttttactccttaaagagctagaatacatagttttcaccttaaaagaagggggaaaatcataaatacaatgaatcaactgaccattacgtagtagacaatttctgtaatgtccccttctttctaggctctgttgctgtgtgaatccattagatttacagtatcgtaatatacaagttttctttaaagccctctcctttagaatttaaaannnnnnnnnnnnnnnnnnnnnnnatgtgtaacttgtgatgccttagaaaaatatc

SEQ ID NO: 4580 - DNA, 555 bp, Homo sapiens
  misc_feature (26)..(26): n includes a, c, g, or t, or contains no nucleotide
  misc_feature (28)..(29): n includes a, c, g, or t, or contains no nucleotide
  misc_feature (38)..(39): n includes a, c, g, or t, or contains no nucleotide
  misc_feature (51)..(69): n includes a, c, g, or t, or contains no nucleotide
  misc_feature (308)..(308): n includes a, c, g, or t, or contains no nucleotide
  misc_feature (335)..(368): n includes a, c, g, or t, or contains no nucleotide
  misc_feature (486)..(527): n includes a, c, g, or t, or contains no nucleotide
tggtgtctgggagcatccaggttctnanncacatgtcnngccgcgttggannnnnnnnnnnnnnnnnnngcatcatgctggatgccttcgcccaagagatggaccacacccagtcccgcatggacggggtcctcaggaagttggccaaagtatcccacatgacgagtgaccgccgacagtggtgtgccatcgccgtgctagtgggggtgcttctcctcgttctcatcttactattctctctctgaccccagccctccctggcaggctggtcccttaagcctggggagccaccaagcactttggagctngcctcgccccctaggaggagagggtcnnnnnnnnnnnnnnnnnnnnnnnnnnnnnnnnnntggggagctgtccccatggctctcccctagagccagtgggacccttcaggaccctgggctggaaccaccaccactggtcctgtctcaagtgcacttagggggtggtggaggcagggannnnnnnnnnnnnnnnnnnnnnnnnnnnnnnnnnnnnnnnnnaaagccatttgcccctgtgccttataca

SEQ ID NO: 4581 - DNA, 402 bp, Homo sapiens
  misc_feature (117)..(133): n includes a, c, g, or t, or contains no nucleotide
  misc_feature (156)..(156): n includes a, c, g, or t, or contains no nucleotide
  misc_feature (158)..(166): n includes a, c, g, or t, or contains no nucleotide
  misc_feature (168)..(173): n includes a, c, g, or t, or contains no nucleotide
  misc_feature (195)..(195): n includes a, c, g, or t, or contains no nucleotide
  misc_feature (198)..(199): n includes a, c, g, or t, or contains no nucleotide
  misc_feature (201)..(262): n includes a, c, g, or t, or contains no nucleotide
tactttgtttacctcggtgcttacaacagaatgctgccctacatcgtcatgggtagtctgactgtcctgattggaatcctcaccctttttttccctgaaagtttgggaatgactctnnnnnnnnnnnnnnnnnagatgcagaaagtgaaatggttnannnnnnnnnannnnnnaaaaaaacaagagactcaatgnagnnannnnnnnnnnnnnnnnnnnnnnnnnnnnnnnnnnnnnnnnnnnnnnnnnnnnnnnnnnnnnntgaaaaacagaaaaataagaccctgtggagaaattcgttgttcccactgaaatggactgactgtaacgattgacaccaaaatgaaccttgctatcaagaaatgctcgtcatacagtaaactctggatgattcttccagat

SEQ ID NO: 4582 - DNA, 476 bp, Homo sapiens
  misc_feature (40)..(40): n includes a, c, g, or t, or contains no nucleotide
  misc_feature (46)..(46): n includes a, c, g, or t, or contains no nucleotide
  misc_feature (391)..(406): n includes a, c, g, or t, or contains no nucleotide
gccttagatctgtttttaagtcttgtatattcctacatangctgtnccgatgtattatatttgtatagtgaattgtgtacaatttttgaataagtgcatcatcacttaacctttatgttgtttgaatagtgatgatgatacatttcttcagacatttaactgtcatttttttcctttgtcatttgtgagttttatttgtacagttcctcatgaagttgcatctgagatgtgtgtatatgaaaagattatacaagggtaaaattaagcaatatattaactatggttcttcaggagaaagcttacagtgtttcaggttgtgatttattttcaaaatggagttgactctgaacatcactttgttcacctgcattgatgtttgtatttctagtgnnnnnnnnnnnnnnnnaggtagatatattcagagaaattttaaatacatttatgcaagttaatattgctttgctgatgctatttgc

SEQ ID NO: 4583 - DNA, 448 bp, Homo sapiens
  misc_feature (117)..(133): n includes a, c, g, or t, or contains no nucleotide
  misc_feature (137)..(137): n includes a, c, g, or t, or contains no nucleotide
  misc_feature (181)..(181): n includes a, c, g, or t, or contains no nucleotide
  misc_feature (203)..(203): n includes a, c, g, or t, or contains no nucleotide
  misc_feature (375)..(376): n includes a, c, g, or t, or contains no nucleotide
  misc_feature (417)..(417): n includes a, c, g, or t, or contains no nucleotide
gctgagctggagctccaggtgtcctatctttctcagtggggtggcacggagcggggccgcctccctcttctctccaggcaggtggggctgtggttatgcgatagggtctcccttccnnnnnnnnnnnnnnnnnggancttgtaactctttatcctcatggtgcccactacgagtcatactnttccccatgctgctcatcctcntgggccccatccactcagccaaagcagaatgcagggtttcctgcctgacaacccttctcacctcccaagtcccacttttgaacaagctgatgattctgaaactggcccaatttcctaacaagccggatgcttgagaaacctacatttggacaatgagaggctgctcctgcgnnctgcgggccacctcctcttccttggctcctgctttcttttnagactatatcaacctacaactttagtcggga

SEQ ID NO: 4584 - DNA, 523 bp, Homo sapiens
  misc_feature (33)..(52): n includes a, c, g, or t, or contains no nucleotide
  misc_feature (65)..(65): n includes a, c, g, or t, or contains no nucleotide
  misc_feature (78)..(78): n includes a, c, g, or t, or contains no nucleotide
  misc_feature (104)..(104): n includes a, c, g, or t, or contains no nucleotide
  misc_feature (169)..(169): n includes a, c, g, or t, or contains no nucleotide
  misc_feature (350)..(391): n includes a, c, g, or t, or contains no nucleotide
aggactgcagccactgattctctcttgtccttnnnnnnnnnnnnnnnnnnnnacctcagcttggncactcaggtgctngaagggtaatatggactcagccttgncaaatagccagtgctagttctgacccaaccacagaggatgctgacatcatttgtattatgttccnaaggctactacagagaaggctgcctgctatgtatttgcaaggctgatttatggtcagaatttccctctgatatgtctagggtgtgatttaggtcagtagactgtgattcttagcaaaaaatgaacagtgataagtatactgggggcaaaatcagaatggaatgctctggtctatataaccnnnnnnnnnnnnnnnnnnnnnnnnnnnnnnnnnnnnnnnnnnaacctatgagggtgagctggtcccctctatatatacatcatacttaactttactaagtaatctcacagcatttgccaagtctcccaatatccaattttaaaatgaaatgcattttgctagacagttaaactg

SEQ ID NO: 4585 - DNA, 505 bp, Homo sapiens
acatggagaaagctctgtggattcatcactgtggtgttctccatgtctgctagccatttaggtaagggtagggcacttttaatttaaatgacttcttgcaccatcttgcctaatggactagattggactgtatcaacattgatttactccactttttatgccttccattgtgatgacgtcaaacacagtgaaagccttcagtcatgctatgggatttaattgtgtatcctcattactgtatcatttgtggggtacaccccttccccctttttttaaattaaatacagctcattcttactgtggcttgtagcattcctcctcttctggcctcctggactgctccccttcatctcttacccttgccccctccacccggtcttggtggtggtatattaaaaaaagaaagaatgaaagcacacaaaatgagtcagtttggggtcagtggtataaagggggtatatgttgcaaacaaatgttttagtaacagttggctgtaatcactcct

SEQ ID NO: 4586 - DNA, 279 bp, Homo sapiens
  misc_feature (108)..(160): n includes a, c, g, or t, or contains no nucleotide
agtcgtggcagaacggagcatcagccagaccctgttgtgggcgttgtcatcaagggagcttgaatggagggtctggtgtcagatacagccgactccagccccagctcnnnnnnnnnnnnnnnnnnnnnnnnnnnnnnnnnnnnnnnnnnnnnnnnnnnnngacatcaacagcccactctgcttccctttctgagtcccctgtccagcactgcctagtgttggagggtagaccaaggctgtgcatgattcaccccctccttccatcctggagctggcagt

SEQ ID NO: 4587 - DNA, 514 bp, Homo sapiens
  misc_feature (128)..(128): n includes a, c, g, or t, or contains no nucleotide
  misc_feature (145)..(145): n includes a, c, g, or t, or contains no nucleotide
  misc_feature (150)..(154): n includes a, c, g, or t, or contains no nucleotide
  misc_feature (159)..(160): n includes a, c, g, or t, or contains no nucleotide
  misc_feature (244)..(245): n includes a, c, g, or t, or contains no nucleotide
  misc_feature (327)..(327): n includes a, c, g, or t, or contains no nucleotide
tgacagaagccaagtaaggaactgaagttgtatctgactgtagggtgaatgtctgaggcctgcctcctaataaagactcaaggaggaagtcaattgggcatctgctaatagaatgaactcatgatggnaaacttcagttcatttnctttnnnnntgaannttccctggttctgttccattttgagcgaaattggccttgggaaaaaccacgttcttcctttccgattcttcatccggtctacgnntatgcaattcctccccaaatatagatcttatttctgctcatttcccctacttattaaaatcacaccaaacacttactatttncttatctctttcactttttaaatatctttcaccaggttatattttggtattatttttccaaacatttttaagcactgaatatcgaacaagcactcaaattgaagtatcagtcatgttttgtgtatttttcgctgataaaaattatttaacatttatatttttacttgattacatatgcacatgtatg

SEQ ID NO: 4588 - DNA, 505 bp, Homo sapiens
ttaacaccgaacaccatgccttcaattaagttgcagagttctgatggagagatatttgaagttgatgtggaaattgccaaacaatctgtaactattaagaccatgttggaagatttgggaatggatgatgaaggagatgatgacccagttcctctaccaaatgtgaatgcagcaatattaaaaaaggtcattcagtggtgcacccaccacaaggatgaccctcctcctcctgaagatgatgagaacaaagaaaagcggacagatgatatccctgtttgggaccaagaattcctgaaagttgaccaaggaacactttttgaactcattctggctgcaaactacttagacatcaaaggtttgcttgatgttacatgcaagactgttgccaatatgatcaaggggaaaactcctgaggagattcgcaagaccttcaatatcaaaaatgactttactgaagaggaggaagcccaggtacgcaaagagaaccagtggtgtgaagagaagt

SEQ ID NO: 4589 - DNA, 319 bp, Homo sapiens
  misc_feature (203)..(238): n includes a, c, g, or t, or contains no nucleotide
gttgttttctgttcccttgccatcacactgttgcacagcagcaattgttttaaagagatacatttttagaaatcacaacaaactgaattaaacatgaaagaacccaagacatcatgtatcgcatattagttaatctcctcagacagtaaccatggggaagaaatctggtctaatttattaatctaaaaaaggagaattgaatnnnnnnnnnnnnnnnnnnnnnnnnnnnnnnnnnnnnatttgtttcctcatctttaaaatgaataggtaggttagtagcccttcagtcttaatactttatgatgctatggtttgccat

SEQ ID NO: 4590 - DNA, 432 bp, Homo sapiens
agttatcttacagcaaactgtagtttgcctccaagacaccattgtctccctttaatcttctcttttgtatacatttgttacccatggtgttctttgttccttttcataagctaataccactgtagggattttgttttgaacgcatattgacagcacgctttacttagtagccggttcccatttgccatacaatgtaggttctgcttaatgtaacttcttttttgcttaagcatttgcatgactattagtgcttcaaagtcaatttttaaaaatgcacaagttataaatacagaagaaagagcaacccaccaaacctaacaaggacccccgaacactttcatactaagactgtaagtagatctcagttctgcgtttattgtaagttgataaaaacatctggaagaaaatgactaaaactgtttgcatctttgt

SEQ ID NO: 4591 - DNA, 310 bp, Homo sapiens
  misc_feature (28)..(28): n includes a, c, g, or t, or contains no nucleotide
  misc_feature (45)..(46): n includes a, c, g, or t, or contains no nucleotide
  misc_feature (76)..(76): n includes a, c, g, or t, or contains no nucleotide
  misc_feature (86)..(86): n includes a, c, g, or t, or contains no nucleotide
  misc_feature (99)..(99): n includes a, c, g, or t, or contains no nucleotide
  misc_feature (103)..(103): n includes a, c, g, or t, or contains no nucleotide
  misc_feature (136)..(136): n includes a, c, g, or t, or contains no nucleotide
cgggcttgtcaatcccttctacggccanggcaaggcccaccttgnnaaagccgcagctaccaagaggctcagctancctgcactgncccgagtcagtgncctnccagacgtgagacagttggtgagggcactgctnccagcgagaggccagcaagagaccatctgcccgagtagccgcaaatgtgcttcatctaagcctctggggtgaacatattctagccctgaagaatctgaagttagacaagatggttggctggctcctccaacaatcggccgccactttgttggccaacaggctcacagagaagtg

SEQ ID NO: 4592 - DNA, 475 bp, Homo sapiens
caaactaaatcagtgtgctgctagagggttctttttcacttgacatgcttattagaaagctgacccaacaagagctctctgcctccggtcactcttgctgtggtgctacgtggaagtgaatggagactgatctcaaatctgaactgcagctttccctcctgtgagttggggaaatgatagtcaactcagccttcagattgtatgagaaaaatgaagagaagccaccaaatattttggtactcttcattcatttatctctaaaaccaggagttgaattttcctcatcttgaaagactcttggggtctgtttctggtattttacaaaattgctaagtggaatgcatgaattgcattatgttctctggtaacacgtagagttcagacccttctgaactctgttgataataccacaccatgttctggacccatagctctggcatcctcaggggttgtgatccagctccatatattgttt

SEQ ID NO: 4593 - DNA, 340 bp, Homo sapiens
  misc_feature (27)..(27): n includes a, c, g, or t, or contains no nucleotide
  misc_feature (30)..(81): n includes a, c, g, or t, or contains no nucleotide
  misc_feature (160)..(174): n includes a, c, g, or t, or contains no nucleotide
  misc_feature (195)..(195): n includes a, c, g, or t, or contains no nucleotide
  misc_feature (200)..(200): n includes a, c, g, or t, or contains no nucleotide
gtctgcggctcttcttccggcgtgtcnggnnnnnnnnnnnnnnnnnnnnnnnnnnnnnnnnnnnnnnnnnnnnnnnnnnnntctgggtctggtggtgccaggtgccgtgacacgccgtgctgggcttgtgctgcagctgggtggtgtggccctcattctnnnnnnnnnnnnnnngggcagtgctctgcctgtgtnctgcncctgcaggctgcgtgtgctgccgtggatctcctgcatcccttgacccctcccgccatcagaggaaaggctgctccccgaggcaccgcttccctgtgcggcgctgcagaggggccctcagtgtggcactcctcgtcaaaga

SEQ ID NO: 4594 - DNA, 595 bp, Homo sapiens
gacttcatcaatgatggcttggaggctgcagatagtgaccccagtgtgccgccttacgacacagccctcatctatgactacgagggtgacggctcggtggcggggacgctgagctccatcctgtccagccagggcgatgaggaccaggactacgactacctcagagactgggggccccgcttcgcccggctggcagacatgtatgggcacccgtgcgggttggagtacggggccagatgggaccaccaggccagggagggtctttctcctggggcactgctacccagacacagaggccggacagcctgaccctggggcgcaactggacatgccactccccggcctcgtggcagtgatggcccctgcagaggcagcctgaggtcaccgggcccgacccccctgggcctggggcagcctccttcctgtaggcgagggcccaagtctgggggcagaacctgagtgtggatggggcggccaggaagaggccccttcctgccggggtgggaagagtttctctccatcggccccatgcgggtcacctccctagtcccacctttgcctcctaccagtgaacctcatctttgtatgaaagaca

SEQ ID NO: 4595 - DNA, 582 bp, Homo sapiens
  misc_feature (268)..(269): n includes a, c, g, or t, or contains no nucleotide
  misc_feature (274)..(277): n includes a, c, g, or t, or contains no nucleotide
  misc_feature (280)..(281): n includes a, c, g, or t, or contains no nucleotide
  misc_feature (283)..(284): n includes a, c, g, or t, or contains no nucleotide
  misc_feature (350)..(350): n includes a, c, g, or t, or contains no nucleotide
  misc_feature (433)..(449): n includes a, c, g, or t, or contains no nucleotide
cttaaagctttgagcacctgccattttgccttgcatcgtttccctcgtcatgcatttccacatatccacaaacacagaacgactttagacaagcacatgttacacctgtgttgccacaagcagtcattcttgacggctccagtttttatttgacacttgagtttagttttctcttttataaacccagtgaactcctgcactggcatttggatgtgtgttaatgctatttgttttgtcttaaaagtaaaacctttctcagtttgaaaannaaaannnnaannannagttctttagctttgcttatgagttcctcttctcaattattgtgttgaaggcagcctattagatanaaaactccttaccagcctatggacagaaaatgaataatcctttgctactttcctggcatgaattgctttttgccttggaaggnnnnnnnnnnnnnnnnntagcagaatttttatatcacctaagcctaaatgatgctctaaaaatagttttggcaaagctaagactggaaaagagtcttgttagtaatttgtgcttgaataaaatggggagagccaggctaacgcaacacta

SEQ ID NO: 4596 - DNA, 482 bp, Homo sapiens
  misc_feature (167)..(200): n includes a, c, g, or t, or contains no nucleotide
  misc_feature (348)..(349): n includes a, c, g, or t, or contains no nucleotide
  misc_feature (351)..(351): n includes a, c, g, or t, or contains no nucleotide
  misc_feature (354)..(354): n includes a, c, g, or t, or contains no nucleotide
  misc_feature (358)..(372): n includes a, c, g, or t, or contains no nucleotide
  misc_feature (404)..(437): n includes a, c, g, or t, or contains no nucleotide
cccaaagtcaagcaagagactagttgaagggagttctggggccaggctcactggaccattgtcacaaccctctgtttctctttgactaagtgccctggctacaggaattacacagttctctttctccaaagggcaagatctcatttcaatttctttattagagggcnnnnnnnnnnnnnnnnnnnnnnnnnnnnnnnnnnactatccagtgatttatatcctgatttcaaccagtcacttagctgataatcacagtaagaagacttctggtattatctctctatcagataagattttgttaatgtactattttactcttcaataaataaaacagtttattatctcaannanaanaaannnnnnnnnnnnnnnagatctcatttcaatttctttattaaagggcnnnnnnnnnnnnnnnnnnnnnnnnnnnnnnnnnnactatccagtgatttatatcctgatttcaaccagtcacttagctg

SEQ ID NO: 4597 - DNA, 544 bp, Homo sapiens
  misc_feature (61)..(61): n includes a, c, g, or t, or contains no nucleotide
  misc_feature (83)..(83): n includes a, c, g, or t, or contains no nucleotide
  misc_feature (93)..(93): n includes a, c, g, or t, or contains no nucleotide
  misc_feature (163)..(163): n includes a, c, g, or t, or contains no nucleotide
  misc_feature (170)..(170): n includes a, c, g, or t, or contains no nucleotide
  misc_feature (177)..(177): n includes a, c, g, or t, or contains no nucleotide
  misc_feature (180)..(194): n includes a, c, g, or t, or contains no nucleotide
  misc_feature (204)..(205): n includes a, c, g, or t, or contains no nucleotide
  misc_feature (208)..(212): n includes a, c, g, or t, or contains no nucleotide
  misc_feature (216)..(216): n includes a, c, g, or t, or contains no nucleotide
  misc_feature (223)..(229): n includes a, c, g, or t, or contains no nucleotide
  misc_feature (231)..(231): n includes a, c, g, or t, or contains no nucleotide
  misc_feature (234)..(236): n includes a, c, g, or t, or contains no nucleotide
  misc_feature (238)..(254): n includes a, c, g, or t, or contains no nucleotide
  misc_feature (256)..(256): n includes a, c, g, or t, or contains no nucleotide
  misc_feature (454)..(473): n includes a, c, g, or t, or contains no nucleotide
ccagtttgttcgtgctgatgttgggggagatctggggggagttggtacagctctgttcttncccttgtcctataccgggaacntcccctccangggtacccacagatctgcattgccctggtcattttagaagtttttgttttaaaaaacaactggaaagatngcagagntactgangcnnnnnnnnnnnnnnngaggtagggnngtnnnnntccnccaatannnnnnncnctnnncnnnnnnnnnnnnnnnnnancccaaggctctccatgcctttctacctaagtgtttgtattttattttaaattatttattctggagccacagcccccttgcttatgaggttcttatggagagtgagaaagggaagggaaatagggcaccatggtccggtggtttgtagttccttcaaagtcaggcactgggagctagaggagtctcaagctccccttannnnnnnnnnnnnnnnnnnncagtcctaatttttcttgcctgccccgccttggggaatgcctcacccacccaggtcctgacctgtgcaata

SEQ ID NO: 4598 - DNA, 346 bp, Homo sapiens
  misc_feature (33)..(33): n includes a, c, g, or t, or contains no nucleotide
  misc_feature (42)..(42): n includes a, c, g, or t, or contains no nucleotide
gctgctgaccttacgcctgtatattaagcctcngcaggatgnccggacaatggtgaagaaactccagatatcaaggaattgggaaatcctggccaaaccaccccaagatgattacactgaaatgtagtattagtactgctgccagatctctttttaacatcatgtgcgtctcttgggatccagcaaaagtgttaagccacaatgcccttgtgccttttaatataccacagtgccagttaaactaatatttttgtttgttgcttttgggagttattttcattagtgatttcagcaaatctcatgataaaggacaaggtcaagaactccagagcactgagcagagagg

SEQ ID NO: 4599 - DNA, 67 bp, Homo sapiens
tgtcctgcccaacatccaggctgtgctactgcccaagaagaccgagagtcaccacaaggccaaaggc

SEQ ID NO: 4600 - DNA, 137 bp, Homo sapiens
gcatcacctttgaccaggctgacctgaccatcaagctgccagacggacatgaattcaagttccccaaccgcctcaacatggaggccatcaactacatggcggcggatggagacttcaagattaaagtgcgtggcctt

SEQ ID NO: 4601 - DNA, 460 bp, Homo sapiens
  misc_feature (56)..(81): n includes a, c, g, or t, or contains no nucleotide
  misc_feature (273)..(288): n includes a, c, g, or t, or contains no nucleotide
atgcctccgctgaaggccccgagggcgaaggtaccgaaagcacagtaatcactggnnnnnnnnnnnnnnnnnnnnnnnnnntgcaggaaacaagtttcacaaaagaagcctacaagaagtacatcaaagattacatgaaatcaatcaaagggaaacttgaagaacagagaccagaaagagtaaaaccttttatgacaggggctgcagaacaaatcaagcacatccttgctaatttcaaaaactaccagttctttattggtgaaaacatgaatnnnnnnnnnnnnnnnnctctattggactaccgtgaggatggtgtgaccccatatatgattttctttaaggatggtttagaaatggaaaaatgttaacaaatgtggcaattattttggatctatcacctgtcatcataactggcttctgcttgtcatccacacaacaccaggacttaagacaaatggga

SEQ ID NO: 4602 - DNA, 73 bp, Homo sapiens
gtcaaaccactgttattaacagatgtagcaacatgagaaacgcttatgttacaggttacatgagagcaatcat

SEQ ID NO: 4603 - DNA, 580 bp, Homo sapiens
tcgccgagaacaacttcacggagctccagagcgtgcagcccccgcagctgcagcagctctaccgccacatggagctggagcagatgcacgtcctcgatacccccatggtgccaccccatcccagtcttggccaccaggtctcctacctgccccggatgtgcctccagtacccatccctgtccccagcccagcccagctcagatgaggaggagggcgagcggcagagccccccactggaggtgtctgacggcgaggcggatggcctggagcccgggcctgggctcctgcctggggagacaggcagcaagaagaagatccgcctgtaccagttcctgttggacctgctccgcagcggcgacatgaaggacagcatctggtgggtggacaaggacaagggcaccttccagttctcgtccaagcacaaggaggcgctggcgcaccgctggggcatccagaagggcaaccgcaagaagatgacctaccagaagatggcgcgcgcgctgcgcaactacggcaagacgggcgaggtcaagaaggtgaagaagaagctcacctaccagttcagcggcgaagtgctggg

SEQ ID NO: 4604 - DNA, 499 bp, Homo sapiens
atgttctagttctgtggccatctgcttagtagagctttttgcatgtatcttctaagaattttatctgttttgtactttagaaatgtcagttgctgcattcctaaactgtttatttgcactatgagcctatagactatcagttccctttgggcggattgttgtttaacttgtaaatgaaaaaattctcttaaaccacagcactattgagtgaaacattgaactcatatctgtaagaaataaagagaagatatattagttttttaattggtattttaatttttatatatgcaggaaagaatagaagtgattgaatattgttaattataccaccgtgtgttagaaaagtaagaagcagtcaattttcacatcaaagacagcatctaagaagttttgttctgtcctggaattattttagtagtgtttcagtaatgttgactgtattttccaacttgttcaaattattaccagtgaatctttgtcagcagttcccttttaaatg

SEQ ID NO: 4605 - DNA, 490 bp, Homo sapiens
  misc_feature (43)..(62): n includes a, c, g, or t, or contains no nucleotide
  misc_feature (274)..(274): n includes a, c, g, or t, or contains no nucleotide
  misc_feature (283)..(283): n includes a, c, g, or t, or contains no nucleotide
acagaaggaggctgccctgtcatcctgagtccgtacacatggnnnnnnnnnnnnnnnnnnnnccaaggaggcgctggtggtggcttcagcggaggcaggccgggggagggaagggatcctatatgtcctgttggctcttaacaaagggtcagcatttccaaatcttagacttgaacaaacaaaacacccaacaaaaaagaacaagagaataatttaaaagttgaatcattacttgactaacagacttcggtccaccatgtccttttcacagccntcttctggnaacagtcaccttgttaattttatttttgaaaattattttcccactctgccctttacttctgactttcctttcctagtttgttcctgccattctgtttttataagtggctacacttgccttctgaatgattgaaagaaacttttacatcttttcttccaaaataaaagtaacaagctgactgtgattcttaaattgagaccagagcag

SEQ ID NO: 4606 - DNA, 517 bp, Homo sapiens
  misc_feature (305)..(308): n includes a, c, g, or t, or contains no nucleotide
taatgaggctcctccgctctggacacaacccttttatagattaatttctctgccaattaacttgtcattttcagtacatattttactattccacaccaaccataattacaacaagggatttttcttatgcactcctatgcatgtgaataacatgtggtgtaattctgcttcttacagaagtattactgaaggtattatttccaatattatttggtttattatgcggatcttttttatatatgcagtcccatcccttctgtgccactcaatgccatccagacatggtttttccctccaggggcctnnnntctccagagggcacttcggctgcctctgcttcctctcattcgaggcccggctcttgctgacagaataggttccgttctgggcggtggttctcgagcctgccattcaaaaccaaagcaaattggagcatttctcacaacatggtattgaagttcctttttgttctcaaaagttgtgaccgtgttaaattgtactcccttagtcctgtaag

SEQ ID NO: 4607 - DNA, 380 bp, Homo sapiens
  misc_feature (91)..(91): n includes a, c, g, or t, or contains no nucleotide
  misc_feature (156)..(179): n includes a, c, g, or t, or contains no nucleotide
  misc_feature (220)..(220): n includes a, c, g, or t, or contains no nucleotide
  misc_feature (224)..(224): n includes a, c, g, or t, or contains no nucleotide
  misc_feature (243)..(269): n includes a, c, g, or t, or contains no nucleotide
tcatccctcggtaccggttccagagcaatcacatggatatggtgagaatagaatcaccagaggaaatttctttacttcccaaaacatcctnggaatatccctcagcctggtgagggtgatgttcgggaggaggccttgtccacagggggacttgannnnnnnnnnnnnnnnnnnnnnnnggtttgacaaacatggcaaccgactggggaggggcaagggnctanctatgatgcctatctgaannnnnnnnnnnnnnnnnnnnnnnnnnnaagccctacaccctggcgttggctttcaaagaacagatttgcctccaggtcccagtgaatgaaaacgacatgaaggtagatgaagtcctttacgaagactcgtcaacagct

SEQ ID NO: 4608 - DNA, 412 bp, Homo sapiens
  misc_feature (110)..(110): n includes a, c, g, or t, or contains no nucleotide
  misc_feature (384)..(384): n includes a, c, g, or t, or contains no nucleotide
ggttctacaagctgcacgagcggaggtgtgagcccattgccatgacagtgcctcgaaagtcggacctgttccaggaggacctgtacccacccaccgcagggcccgacccntgccctcacggctgaggagtggctggggggtcgggatgctgggcccctcctcatctccctcaaggatggctacgtacccccaaagagccgggagctgagggtcaaccggggcctggacaccgggcgcaggagggcagcaccagaggccagtggcactcccagctcggatgccgtgtctcggctggaggaggagatgcggaagctccaggccacggtgcaggagctccagaagcgcttggacaggctggaggagacagtccaggccaagtagagncccgcagggcctccagcagggtcagcca

SEQ ID NO: 4609 - DNA, 376 bp, Homo sapiens
  misc_feature (105)..(105): n includes a, c, g, or t, or contains no nucleotide
  misc_feature (150)..(164): n includes a, c, g, or t, or contains no nucleotide
  misc_feature (278)..(284): n includes a, c, g, or t, or contains no nucleotide
  misc_feature (286)..(287): n includes a, c, g, or t, or contains no nucleotide
  misc_feature (289)..(292): n includes a, c, g, or t, or contains no nucleotide
  misc_feature (294)..(295): n includes a, c, g, or t, or contains no nucleotide
  misc_feature (298)..(299): n includes a, c, g, or t, or contains no nucleotide
  misc_feature (301)..(306): n includes a, c, g, or t, or contains no nucleotide
  misc_feature (313)..(313): n includes a, c, g, or t, or contains no nucleotide
  misc_feature (329)..(329): n includes a, c, g, or t, or contains no nucleotide
  misc_feature (345)..(345): n includes a, c, g, or t, or contains no nucleotide
  misc_feature (351)..(351): n includes a, c, g, or t, or contains no nucleotide
tgtgaagaaggcagctcttggcctcccactcccacacttctttgcctataaatcttcctagcagcaatttgagctacctgaggaggaggcagggcagaaagggcnagggcctgcctctgacctgccgtgtcctttgcaggaaggaggtannnnnnnnnnnnnnnttattctattccccacccacacccccaggcagggttggaaatgaaggacttttttaacctttgttttgttttttaaaaataaatctgtaaaatctgaaaaaaaaaaaaaaaaannnnnnnanncnnnngnntcnntnnnnnngatgatntcgacccggggaattncggaccggtccctgangccgtnccaacttttcctatagtgaagtcgt

SEQ ID NO: 4610 - DNA, 545 bp, Homo sapiens
  misc_feature (64)..(64): n includes a, c, g, or t, or contains no nucleotide
  misc_feature (69)..(69): n includes a, c, g, or t, or contains no nucleotide
  misc_feature (83)..(83): n includes a, c, g, or t, or contains no nucleotide
  misc_feature (354)..(378): n includes a, c, g, or t, or contains no nucleotide
tcgcttaaggacagcaggaaccatctgccttgagacctttaaagacttccctcagatgggtcgnttcanccttaagagatganggtaagaccattgcaattggaaaagttctgaaactggttccagagaaagactaagcattttcttgatgaccctgcacaatactgtgaggaaaattgactgcagaagcctacttcacaccgccttctcttattttctgcccattgataaacctctccccatattttgcaaagaggaaattcacagcaaaagtccacattatgtcagctttctcatattgagagctctgctatgccactgttgaatttttcccaagattcctgtccctagccnnnnnnnnnnnnnnnnnnnnnnnnnacagatttggcaatagctttgtaagtgatgtggacataattgcctacaataatgaaaacctacaggaatttttttatttttcattttccccttaggcatatttagtatttttcccccaggcagatcattctgagtgtgcgagtgtgtgtgcacatgttacaaaggca

SEQ ID NO: 4611 - DNA, 323 bp, Homo sapiens
cccatagcaagttatagccgagcaaatgaaccgtcctcctgcctctgttgccaacacgagatcaatcagccttggtcaatggacaaacacttaggactgaactgaacccctccccatgaacacaagggttttatcctttcctttaaaaacagtgtttgaaatgaagactgtcaactatcccataatttatttattcttcttcaatgtttgtaaagtgcatgagtcatgttcacacttgaagtctagtagtgcactgtaataattcattttttaaaagattatttaatgcccatttcaaaatacagtagtttacacagctacag

SEQ ID NO: 4612 - DNA, 311 bp, Homo sapiens
  misc_feature (68)..(91): n includes a, c, g, or t, or contains no nucleotide
  misc_feature (260)..(283): n includes a, c, g, or t, or contains no nucleotide
ccctgaggatggtcatcagtaatatcttcaacgattggcttccaggtcctcctcagcattggggaacnnnnnnnnnnnnnnnnnnnnnnnntcacgtctggtctcctgacaggtttgctcctaaatctcaaaatatggaaagcacctcatgtggctaaatattttgatgaccaagttttctggaagtttcctcatttggctgttggattttaagcaaaagcatccaagaaaaacaaggcctgttcaaaaacaagacaacnnnnnnnnnnnnnnnnnnnnnnnngtacgtgagaaacgctcatgacagcaaa

SEQ ID NO: 4613 - DNA, 307 bp, Homo sapiens
  misc_feature (61)..(76): n includes a, c, g, or t, or contains no nucleotide
ctgtagctccacattcctgtgcattgaggggttaacattaggctgggaagatgacaaaacnnnnnnnnnnnnnnnngggaattgtcaatatcttccaccaatactcagttcggaaggggcattttgacaccctctctaagggtgagctgaagcagctgcttacaaaggagcttgcaaacaccatcaagaatatcaaagataaagctgtcattgatgaaatattccaaggcctggatgctaatcaagatgaacaggtcgactttcaagaattcatatccctggtagccattgcgctgaaggctgccca

SEQ ID NO: 4614 - DNA, 466 bp, Homo sapiens
  misc_feature (87)..(87): n includes a, c, g, or t, or contains no nucleotide
agtgggtatgcttctctagctccccatcttccaggtccacctcttgacttcctgttcccctaaacctgagcacatcacgccaggccntctttgctgccaggacagcatcagctcactcctcagcaataatctagggtatgtgggaaggtcagggctgtggtaaggaatagaatcaaagaggggagtgatacggggtgggggcacttggccgcctgctaaacttggacattaattttatatcatgacccccttttaagccagtgagctgggcttcagtttttcccaggccatgcacatttaatttatttcagagaaactctaattgtattttcactgcagtatcttgtattttttatttgtgatttaagaaatgtgaagagaaaatacacagacacaataatggctaacattgtttctttcattccttgttctagagctaaccactctaaaattgtttggtaatgtc

SEQ ID NO: 4615 - DNA, 278 bp, Homo sapiens
  misc_feature (83)..(83): n includes a, c, g, or t, or contains no nucleotide
  misc_feature (86)..(87): n includes a, c, g, or t, or contains no nucleotide
  misc_feature (96)..(96): n includes a, c, g, or t, or contains no nucleotide
  misc_feature (149)..(182): n includes a, c, g, or t, or contains no nucleotide
  misc_feature (216)..(218): n includes a, c, g, or t, or contains no nucleotide
ctggtgtctcctgcacctgcgctggttcctgcaagtgcaaagagtgcaaatgcacctcctgcaagaagagctgctgctcctgnctnncccgtgggntgtagcaagtgtgcccagggctgtgtttgcaaaggggcgtcagagaagtgcannnnnnnnnnnnnnnnnnnnnnnnnnnnnnnnnncagatgtaaacagagagacatgtacaaacctggnnnttttttttttataccaccttgacccatttgctacattccttttcctgtgaaatatgtgag

SEQ ID NO: 4616 - DNA, 522 bp, Homo sapiens
  misc_feature (32)..(36): n includes a, c, g, or t, or contains no nucleotide
  misc_feature (47)..(48): n includes a, c, g, or t, or contains no nucleotide
  misc_feature (60)..(60): n includes a, c, g, or t, or contains no nucleotide
  misc_feature (62)..(62): n includes a, c, g, or t, or contains no nucleotide
  misc_feature (68)..(68): n includes a, c, g, or t, or contains no nucleotide
  misc_feature (72)..(72): n includes a, c, g, or t, or contains no nucleotide
  misc_feature (82)..(82): n includes a, c, g, or t, or contains no nucleotide
  misc_feature (87)..(87): n includes a, c, g, or t, or contains no nucleotide
  misc_feature (89)..(89): n includes a, c, g, or t, or contains no nucleotide
  misc_feature (91)..(92): n includes a, c, g, or t, or contains no nucleotide
  misc_feature (102)..(102): n includes a, c, g, or t, or contains no nucleotide
  misc_feature (104)..(104): n includes a, c, g, or t, or contains no nucleotide
  misc_feature (109)..(160): n includes a, c, g, or t, or contains no nucleotide
  misc_feature (179)..(214): n includes a, c, g, or t, or contains no nucleotide
  misc_feature (418)..(418): n includes a, c, g, or t, or contains no nucleotide
accgagagcacctggtgatgatggagaagatnnnnngggcccatccnntcacacatgatncnccgtancagnaagcagaaanatttntncnnaagggggccnantttgnnnnnnnnnnnnnnnnnnnnnnnnnnnnnnnnnnnnnnnnnnnnnnnnnnnnaagagttacatgctccaannnnnnnnnnnnnnnnnnnnnnnnnnnnnnnnnnnnaggaggatgttagaatttgaccctgcccagcgcatcacactggccgaggccctgctgcaccccttctttgctggcctgacccctgaggagcggtccttccacaccagccgcaacccaagcagatgacaggcacaggccaccgcatgaggagatggagggcgggactgggccgcccagccccttgactccagcctcgaccgccangccccaggccagagccacccaatgaacagtgcaatgtgaaggaaggcaggagcctgcaggggagcagacttggtgcccagctgccagaaagcacagatttgacc

SEQ ID NO: 4617 - DNA, 595 bp, Homo sapiens
tgctgtgttcagtagaaggaaatgtaaacgaaggctgacttgattgtgccatttagagggaactcttggtacctggaaatgtgaatctggaatattacctgtgtcatcaaagtagtgatggattcagtactcctcaaccactctcctaatgattggaacaaaagcaaacaaaaaagaaatctctctataaaatgaataaaatgtttaagaaaagagaaagagaaaaggaattaattcagtgaaggatgattttgctcctagttttggagtttgaatttctgccaggattgaattattttgaaatctcctgtctttttaaactttttcaaaataggtctctaaggaaaaccagcagaacattagcctgtgcaaaaccatctgtttggggagcacactcttccattatgcttggcacatagatctccctgtggtgggattttttttttccctttttttgtgggggagggttggtggtatatttttcccctcttttttccttcctctcctacatctcccttttcccccgatccaagttgtagatggaatagaagcccttgttgctgtagatgtgcgtgcagtctggcagccttaagcc

SEQ ID NO: 4618 - DNA, 386 bp, Homo sapiens
  misc_feature (33)..(33): n includes a, c, g, or t, or contains no nucleotide
  misc_feature (46)..(46): n includes a, c, g, or t, or contains no nucleotide
  misc_feature (52)..(52): n includes a, c, g, or t, or contains no nucleotide
  misc_feature (57)..(57): n includes a, c, g, or t, or contains no nucleotide
ccgctgtgttcaggaggccacatatacagcccntcccagccacacntgcccntgctntggggcctgctgagccggctgccctgggcacccggttccaggcagcacagacgtggggcatccccagaaagactccatcccaggaccaggttcccctgcgtgctcttcgagagggtgtcagtgagcagactgcaccccaagctcccgactccaggtcccctgatcttggggcctgtttcccatgggattcaagagggacagccccagctttgtgtgtgtttaagcttaggaatcgcctttatggaaagggctatgtgggagagtcagctatcttgtctggttttcttgagacctcagatgtgtgttcagcagggctgaaagcttttatt

SEQ ID NO: 4619 - DNA, 584 bp, Homo sapiens
  misc_feature (112)..(114): n includes a, c, g, or t, or contains no nucleotide
  misc_feature (425)..(425): n includes a, c, g, or t, or contains no nucleotide
  misc_feature (442)..(444): n includes a, c, g, or t, or contains no nucleotide
tgctctggacagtaagatccatgagacgattgagtccataaaccagctcaagatccagagggacttcatgctaagcttctccagagaccccaaaggctatgtccaagacctnnntccgctcccagagccgggacctcaaggtgatgacagatgtagccggcaaccctgaagaggagcgccgggctgagttctaccaccagccctggtcccaggaggccgtcagtcgctacttctactgcaagatccagcagcgcaggcaggagctggagcagtcgctggttgtgcgcaacacctaggagcccaaaaataagcagcacgacggaactttcagccgtgtcccgggccccagcattttgccccgggctccagcatcactcctctgccaccttggggtgtggggctggattaaaagtcattcatctganaaaaaaaaaaaaaaaannngaaactggggaggggagggggagagaaggggaagggaagaaggtggggaggcagtgggtccctcgggacgactccccattcccttcccttggattcttctccttactcaattttccctagacctaaaaacagtttggcag

SEQ ID NO: 4620 - DNA, 444 bp, Homo sapiens
  misc_feature (129)..(129): n includes a, c, g, or t, or contains no nucleotide
  misc_feature (135)..(136): n includes a, c, g, or t, or contains no nucleotide
  misc_feature (140)..(140): n includes a, c, g, or t, or contains no nucleotide
  misc_feature (142)..(142): n includes a, c, g, or t, or contains no nucleotide
  misc_feature (147)..(147): n includes a, c, g, or t, or contains no nucleotide
  misc_feature (149)..(149): n includes a, c, g, or t, or contains no nucleotide
tgctctattgtagcatttcttgatgttgcttagtcacttatttcataaacaacttaatgttctgaataatttcttactaaacattttgttattgggcaagtgattgaaaatagtaaatgctttgtgtgnattgannctgnanttggncnattttcttcagagagctaaattacaattgtcatttataaaaccatcaaaaatattccatccatatactttggggacttgtagggatgcctttctagtcctattctattgcagttatagaaaatctagtcttttgccccagttacttaaaaataaaatattaacactttcccaagggaaacactcggctttctatagaaaattgcactttttgtcgagtaatcctctgcagtgatacttctggtagatgtcacccagtggtttttgttaggtcaaatgttcctgtatagtttttgc

SEQ ID NO: 4621 - DNA, 249 bp, Homo sapiens
gcctgcagtttcttgtgtagatttgaaaattgtataccaatgtgttttctgtagactctaagatacactgcactttgtttagaaaaaaaactgaagatgaaatatatattgtaaagaagggatattaagaatcttagataacttcttgaaaaagatggcttatgtcatcagtaaagtacctttatgttatgaggatataatgtgtgctttattgaattagaaaattagtgaccattattcacaggtgga

SEQ ID NO: 4622 - DNA, 268 bp, Homo sapiens
  misc_feature (180)..(197): n includes a, c, g, or t, or contains no nucleotide
taaccaattattccaaatgaaggtgtaagaaagggaataagaagaagaagagttgctcatgaggaaaaaccaaaacttgaaaattcaacaaagccaatgaagctcattcttgaaaatattaattacagtcataaatcctaactacattgagcaagagaaagaaagagcaggcacgcattnnnnnnnnnnnnnnnnnnagcagacagcccagcagatcctacacacattttcacaaactaaccccagaacaggctgcaaacctatacca

SEQ ID NO: 4623 - DNA, 529 bp, Homo sapiens
  misc_feature (113)..(113): n includes a, c, g, or t, or contains no nucleotide
  misc_feature (216)..(277): n includes a, c, g, or t, or contains no nucleotide
  misc_feature (367)..(386): n includes a, c, g, or t, or contains no nucleotide
  misc_feature (404)..(404): n includes a, c, g, or t, or contains no nucleotide
  misc_feature (406)..(441): n includes a, c, g, or t, or contains no nucleotide
atcgcaggcctagactcccgaggcttcctctttggcccctccctggcccaggagcttggactgggctgcgtgctcatccgaaagcgggggaagctgccaggccccactctgtnggcctcctattccctggagtacgggaaggctgagctggagattcagaaagacgccctggagccaggacagagggtggtcgtcgtggatgatctgctggccacnnnnnnnnnnnnnnnnnnnnnnnnnnnnnnnnnnnnnnnnnnnnnnnnnnnnnnnnnnnnnngagtgcgtgagcctggtggagctgacctcgcttaagggcagggagaagctggcacctgtacccttcttctctctcctgcagtatgagtgnnnnnnnnnnnnnnnnnnnnaacatctccagctggatncnnnnnnnnnnnnnnnnnnnnnnnnnnnnnnnnnnnnaggggcaccggctgcccacagggaacacattcctttgctggggttcagcgcctctcctggggctggaagtgccaaagcctggggcaaa

SEQ ID NO: 4624 - DNA, 582 bp, Homo sapiens
  misc_feature (48)..(79): n includes a, c, g, or t, or contains no nucleotide
  misc_feature (239)..(257): n includes a, c, g, or t, or contains no nucleotide
  misc_feature (311)..(311): n includes a, c, g, or t, or contains no nucleotide
  misc_feature (472)..(472): n includes a, c, g, or t, or contains no nucleotide
  misc_feature (479)..(480): n includes a, c, g, or t, or contains no nucleotide
  misc_feature (482)..(482): n includes a, c, g, or t, or contains no nucleotide
  misc_feature (498)..(498): n includes a, c, g, or t, or contains no nucleotide
cagttgggcatgttgacagacatgtttcccctcctcccaccctcattnnnnnnnnnnnnnnnnnnnnnnnnnnnnnnnncatcatgaccttctgtcccggccgccttagccccgggcacagggaaggcagctgggccgtttctgtctgtgtcccatcctgctgtccttctgtcctggatgtttcatgggcccggggccccccagggaagcttacccctcctgtgctgggtggaggccannnnnnnnnnnnnnnnnnncccaccttggccctaaaacagccaccaggaaagcagccggagagccggacagcnggcagcctgtctgggttcctgaggcctgggggtggcagacgagcccacggcgccgtggtcccagcagcagggttgtcagtcggagcatcctggggctccctggctcctggccgtctgtgaggtaggcgcagtaccgtgtatcgtaggtagcagtaggaacnggggccnncngcggccctgcagccgntcatggcggtgaggtgtgtgccaagcccacccggggtgcagggcgtgacgtgtggggaataaataggcgttgtgacctcaaaaa

SEQ ID NO: 4625 - DNA, 129 bp, Homo sapiens
  misc_feature (32)..(46): n includes a, c, g, or t, or contains no nucleotide
aatgtatgcgccagggtgcttccgtggggcannnnnnnnnnnnnnnccatccaagcccaaggacctgggataaactgggagaactatggcagctacttgcatcgacttgtacctcacttagcccttggg

SEQ ID NO: 4626 - DNA, 464 bp, Homo sapiens
  misc_feature (31)..(32): n includes a, c, g, or t, or contains no nucleotide
  misc_feature (51)..(82): n includes a, c, g, or t, or contains no nucleotide
  misc_feature (84)..(84): n includes a, c, g, or t, or contains no nucleotide
  misc_feature (112)..(112): n includes a, c, g, or t, or contains no nucleotide
  misc_feature (333)..(365): n includes a, c, g, or t, or contains no nucleotide
tcattcctggtcctggggagacgcccagccnngtttcctccactgagaccnnnnnnnnnnnnnnnnnnnnnnnnnnnnnnnncntaaccccatcttgccagggcgaggcggnccccaatgacagatttccctttagacccagcaggggtcggccaactgatggccggctgtcattcatgtgattgatttgtaatttcatttctggagctccatttgtttttgtttctaaactacagatgtcaactccttggggtgctgatctcgagtgttattttctgattgtggtgttgagagttgcactcccagaaaccttttaagagatacatttatagnnnnnnnnnnnnnnnnnnnnnnnnnnnnnnnnntgacaaggttggccttgggaatagttggctgccaatctccctgctcttggttctcctctagattgaagtttgttttctgatgctgttcttaccagatta

SEQ ID NO: 4627 - DNA, 578 bp, Homo sapiens
  misc_feature (45)..(45): n includes a, c, g, or t, or contains no nucleotide
  misc_feature (52)..(52): n includes a, c, g, or t, or contains no nucleotide
  misc_feature (69)..(104): n includes a, c, g, or t, or contains no nucleotide
  misc_feature (211)..(225): n includes a, c, g, or t, or contains no nucleotide
  misc_feature (349)..(377): n includes a, c, g, or t, or contains no nucleotide
ctctagaatctgtgcggctgctcaagggagaggagggccaagccntgaggcnagcccaccagcgcaatnnnnnnnnnnnnnnnnnnnnnnnnnnnnnnnnnnnncttcctgtcatcccctgccccagccacatcatccccatccgggtgggcaatgcagcactcaacagcaagctctgtgatctcctgctctccaagcatggcatctatgnnnnnnnnnnnnnnnacccaactgtcccccggggtgaagagctcctgcgcttggcaccctccccccaccacagccctcagatgatggaagattttgtggagaagctgctgctggcttggactgcggtggggctgccccnnnnnnnnnnnnnnnnnnnnnnnnnnnnnttctgtcgccgtcctgtacactttgagctcatgagtgagtgggaacgttcctacttcgggaacatggggccccagtatgtcaccacctatgcctgagaagccagctgcctaggattcacaccccacctgcgcttcacttgggtccaggcctactcctgtcttctgctttgttgtgtgcctctagctgaattgagcctaaaa

SEQ ID NO: 4628 - DNA, 415 bp, Homo sapiens
  misc_feature (284)..(324): n includes a, c, g, or t, or contains no nucleotide
ctctgctaagttttctgagatgagggtctagccctgttggggacagaaaagtgtgtagaccttcttcctgctagggctgcactgtcctgggtgttgggcccttctggtggacaaggctgtgccaaccctgtacagaatcgagtgctgtagcctggccagaccccagagcccttgtgccatctttcttcctggccagagtgatggggttccagccatggggaagcaacccaatcctctgtctccttgctccaatggaggcagaagagcccaggacccaagcgtcnnnnnnnnnnnnnnnnnnnnnnnnnnnnnnnnnnnnnnnnnaccctggccctgccccagcctgtgtagctcttcctgcatgtggatgctgcatgtctggtctggggcttggatgttgcactgccccactgcc

SEQ ID NO: 4629 - DNA, 438 bp, Homo sapiens
  misc_feature (75)..(255): n includes a, c, g, or t, or contains no nucleotide
ggccacagactcaacatgtgtgtgtggtggggttccagcccaacatagagtaacattatttgtacctcccaggcnnnnnnnnnnnnnnnnnnnnnnnnnnnnnnnnnnnnnnnnnnnnnnnnnnnnnnnnnnnnnnnnnnnnnnnnnnnnnnnnnnnnnnnnnnnnnnnnnnnnnnnnnnnnnnnnnnnnnnnnnnnnnnnnnnnnnnnnnnnnnnnnnnnnnnnnnnnnnnnnnnnnnnnnnnnnnnnnnnnnngaagagcccaacctcggaggggagctgctgggatcctccttatcttgactgggatgtccctgtctccccctccccttgctccttgaacatggccaaggaaagtgaaaaacaaaaattattcactctgctagcacccttccccttgatgcctgggaataggttttgccaataaacgtatctgtg

SEQ ID NO: 4630 - DNA, 354 bp, Homo sapiens
tcctgctggatagatttagatttcctttctttttttagggcctcagtctgctatctcctttggtggctaccaccactcactcccttgatatcttctactcccttgccttcaccttgcttaagactgagaagggagttagattttgtcactagctcttctttttcctcactgtgtaccccaccaaacaagattagttcaagttaaaaagaacctactggaggtaaactgggagagcaagtgttggatctgggctggtccctttcccataaaattaggtccctggttgtatgttcccatagcaccccatacttcctctctcagaataatcatttcccttgtaatgctcagcatccg

SEQ ID NO: 4631 - DNA, 135 bp, Homo sapiens
ttctggtggctcctgcacctgcgcggactcctgcaagtgcgagggatgcaaatgcacctcctgcaagaagagctgctgctcctgctgccctgcggagtgtgagaagtgtgccaaggactgtgtgtgcaaaggcgg

SEQ ID NO: 4632 - DNA, 368 bp, Homo sapiens
  misc_feature (85)..(85): n includes a, c, g, or t, or contains no nucleotide
  misc_feature (111)..(111): n includes a, c, g, or t, or contains no nucleotide
  misc_feature (151)..(152): n includes a, c, g, or t, or contains no nucleotide
  misc_feature (170)..(170): n includes a, c, g, or t, or contains no nucleotide
tttcttcttctctgggcgccaggtgtgggtgtacacaggcgcgtcggtgctgggcccgaggcgtctggacaagctgggcctgggngccgacgtggcccaggtgaccggggncctccggagtggcagggggaagatgctgctgttcagcggnnggcgcctctggaggttcnacgtgaaggcgcagatggtggatccccggagcgccagcgaggtggaccggatgttccccggggtgcctttggacacgcacgacgtcttccagtaccgagagaaagcctatttctgccaggaccgcttctactggcgcgtgagttcccggagtgagttgaaccaggtggaccaagtgggctacgtgacctatgacatcc

SEQ ID NO: 4633 - DNA, 542 bp, Homo sapiens
  misc_feature (207)..(277): n includes a, c, g, or t, or contains no nucleotide
  misc_feature (279)..(279): n includes a, c, g, or t, or contains no nucleotide
  misc_feature (478)..(481): n includes a, c, g, or t, or contains no nucleotide
  misc_feature (497)..(500): n includes a, c, g, or t, or contains no nucleotide
  misc_feature (502)..(516): n includes a, c, g, or t, or contains no nucleotide
agcttctggtactctcctagagacagaagcaggctggaggtaaggcctttgagcccacaaagccttatcaagtgtcttccatcatggattcattacagcttaatcaaaataacgccccagataccagcccctgtatggcactggcattgtccctgtgcctaacaccagcgtttgaggggctggccttcctgccctacagaggtctcnnnnnnnnnnnnnnnnnnnnnnnnnnnnnnnnnnnnnnnnnnnnnnnnnnnnnnnnnnnnnnnnnnnnnnncnccaggatccagaaggggtttggtctgggacttccttgctctccctcttctcaagtgccttaatagtagggtaagttgttaagagtgggggagagcaggctggcagctctccagtcaggaggcatagtttttactgaacaatcaaagcacttggactcttgctctttctactctgaactaataaatctgttgccaagctnnnnaaaaaaaaaaaaaaannnnannnnnnnnnnnnnnntcagcaaacactgagcacacattttg

SEQ ID NO: 4634 - DNA, 386 bp, Homo sapiens
  misc_feature (71)..(71): n includes a, c, g, or t, or contains no nucleotide
  misc_feature (182)..(182): n includes a, c, g, or t, or contains no nucleotide
  misc_feature (271)..(285): n includes a, c, g, or t, or contains no nucleotide
tatttgtgcaagaatttggaaaaatagaagatgaatcattgattgaatagttataaagatgttatagtaantttattttattttagatattaaatgatgttttattagataaatttcaatcagggtttttagattaaacaaacaaacaattgggtacccagttaaattttcatttcagatanacaacaaataattttttagtataagtacattattgtttatctgaaattttaattgaactaacaatcctagtttgatactcccagtcttnnnnnnnnnnnnnnngttggtagtgctgtgttgaattacggaataatgagttagaactattaaaacagccaaaactccacagtcaatattagtaatttcttgctggttgaaacttg

SEQ ID NO: 4635 - DNA, 492 bp, Homo sapiens
  misc_feature (132)..(132): n includes a, c, g, or t, or contains no nucleotide
  misc_feature (141)..(142): n includes a, c, g, or t, or contains no nucleotide
  misc_feature (148)..(148): n includes a, c, g, or t, or contains no nucleotide
  misc_feature (169)..(183): n includes a, c, g, or t, or contains no nucleotide
  misc_feature (208)..(233): n includes a, c, g, or t, or contains no nucleotide
  misc_feature (364)..(450): n includes a, c, g, or t, or contains no nucleotide
  misc_feature (466)..(467): n includes a, c, g, or t, or contains no nucleotide
ccgtatatcctatggccctgactggaaggatttctacgtagtggaacccctggcatttgaaggtacccctgagcagaaggctctggtgattggtggagaggcttgtatgtggggagaatatgtggacaacanaaacctggnnccccangctctggcccagagcaggggnnnnnnnnnnnnnnntgtggagcaacaagttgacatctgnnnnnnnnnnnnnnnnnnnnnnnnnntcacacttccgctgtgagttgctgaggcgaggtgtccaggcccaacccctcaatgtaggcttctgtgagcaggagtttgaacagacctgagccccaggcaccgaggagggtgctggctgtaggtgaatggnnnnnnnnnnnnnnnnnnnnnnnnnnnnnnnnnnnnnnnnnnnnnnnnnnnnnnnnnnnnnnnnnnnnnnnnnnnnnnnnnnnnnnngagaaaggggccggtnntggcgctcgcattcaataaagagta

SEQ ID NO: 4636 - DNA, 514 bp, Homo sapiens
  misc_feature (79)..(94): n includes a, c, g, or t, or contains no nucleotide
  misc_feature (174)..(188): n includes a, c, g, or t, or contains no nucleotide
  misc_feature (450)..(464): n includes a, c, g, or t, or contains no nucleotide
tctccttccaataaggcccggtaggtcgccacctccagactgaggccggtcttcacctgcaggaggtcctgatagtccnnnnnnnnnnnnnnnntggccaaggtgagggttgccttctcatcctccaggcagtcaatcgctctctgccgctcctcggcctgtatcccgtactcnnnnnnnnnnnnnnncagcgcgtcctccagccgcgcgcgcagctgctccaacccgagcgcctcgcgccgcagcgcctctgcctcctgcgcgcacagccgcgtctcttcctccgcctggagtctgctctcctggccgcgccgcagcgcctcctccagctcgcgcacctcgtcctcgtacagctgcaccgtctcccgccacgactcggccaccagcagtgcgtagctgtcgtgcacctcccgcaggcgtggcggcggcgcggcggggccggtggcgcgnnnnnnnnnnnnnnnggtaaggctggcggcgcgcgcgcgcagctcccgcacgtcgcgttcgtggg

SEQ ID NO: 4637 - DNA, 331 bp, Homo sapiens
  misc_feature (51)..(51): n includes a, c, g, or t, or contains no nucleotide
  misc_feature (78)..(78): n includes a, c, g, or t, or contains no nucleotide
  misc_feature (242)..(264): n includes a, c, g, or t, or contains no nucleotide
cagacccaccattagagagtgaagatgaagatgaggagggagctacagcgnttgaacaaccacagctctattcccatnggacccagaacatgtagagctggtgaaaaggacaatggctggagtaagcctgcctgcgccaggggttcctgcctgggctcgggagatatcggatgcccagtgggaagatgtggtacagaaagccctccaagcccggcaggcatcccctgcctggaagtgaccannnnnnnnnnnnnnnnnnnnnnntacattccaggccagaaccagcacaggactgaacacatccctggttgtaatgtccatttccatcttc

SEQ ID NO: 4638 - DNA, 405 bp, Homo sapiens
  misc_feature (41)..(41): n includes a, c, g, or t, or contains no nucleotide
  misc_feature (59)..(59): n includes a, c, g, or t, or contains no nucleotide
  misc_feature (62)..(63): n includes a, c, g, or t, or contains no nucleotide
  misc_feature (74)..(75): n includes a, c, g, or t, or contains no nucleotide
  misc_feature (82)..(82): n includes a, c, g, or t, or contains no nucleotide
  misc_feature (85)..(102): n includes a, c, g, or t, or contains no nucleotide
  misc_feature (306)..(330): n includes a, c, g, or t, or contains no nucleotide
atgtgaccttccttgggggactgcggaagggacgagggttnccctggagtcttacggtnccnnaacatcaggannccaagtnccnnnnnnnnnnnnnnnnnnagggtccccagggagaccgtgtcagtagggatgtgtgcctggctgtgtacgtgggtgtgcagtgcacgtgagagcacgtggcggcttctgggggccatgtttggggagggaggtgtgccagcagcctggagagcctcagtccctgtagccccctgccctggcacagctgcatgcacttcaagggcagcctttgggggttggggnnnnnnnnnnnnnnnnnnnnnnnnnctgccccaaatccagccagtcctgccccagcccacccccacattggagccctcctgctgctttggtgcctcaaat

SEQ ID NO: 4639 - DNA, 344 bp, Homo sapiens
  misc_feature (226)..(226): n includes a, c, g, or t, or contains no nucleotide
  misc_feature (318)..(318): n includes a, c, g, or t, or contains no nucleotide
ctccgtggtgatggaacgcatccggatggacattcgcaaagtggacgccgtctttgtgggcactggggacctgtttgctgccatgctcctggcgtggacacacaagcaccccaataacctcaaggtggcctgtgagaagaccgtgtctaccttgcaccacgttctgcagaggaccatccagtgtgcaaaagcccaggccggggaaggagtgaggcccagccccatncagctggagctgcggatggtgcagagcaaaagggacatcgaggacccagagatcgtcgtccaggccacggtgctgtgagggccccgccgctngcccgtgacacgcagcgcgttggtgt

SEQ ID NO: 4640 - DNA, 336 bp, Homo sapiens
  misc_feature (33)..(50): n includes a, c, g, or t, or contains no nucleotide
tgaacctgctaagtccgctcctgctccaaaaannnnnnnnnnnnnnnnnntgaccaaggcgcagaagaaggatggtaagaagcgcaagcgtagccgcaaggagagctattccgtgtacgtgtacaaggtgctaaagcaggtccaccccgacaccggcatctcatccaaggccatgggcatcatgaactccttcgtcaacgatatcttcgagcgcatcgctggcgaggcttcccgcctggcgcattacaacaagcgctccaccatcacctccagggagatccagacggccgtgcgcctgctgctgcccggggagctggctaagcacgccgtgtcaga

SEQ ID NO: 4641 - DNA, 408 bp, Homo sapiens
  misc_feature (28)..(28): n includes a, c, g, or t, or contains no nucleotide
  misc_feature (44)..(44): n includes a, c, g, or t, or contains no nucleotide
  misc_feature (380)..(382): n includes a, c, g, or t, or contains no nucleotide
ctcttccatggagtaagaaggaagggangcatgtacgcttggtnccaagattggctagttccttgatagcatcttactctcaccttctttgtgtctgtgatgaaaggaacagtctgtgcaatgggttttacttaaacttcactgttcaacctatgagcaaatctgtatgtgtgagtataagttgagcatagcatacttccagaggtggtcttatggagatggcaagaaaggaggaaatgatttcttcagatctcaaaggagtctgaaatatcatatttctgtgtgtgtctctctcagcccctgcccaggctagagggaaacagctactgataatcgaaaactgctgtttgtggcaggaacccctggctgtgcaaataaannnggctgaggcccctgtgtgatattgaa

SEQ ID NO: 4642 - DNA, 529 bp, Homo sapiens
  misc_feature (281)..(323): n includes a, c, g, or t, or contains no nucleotide
  misc_feature (343)..(343): n includes a, c, g, or t, or contains no nucleotide
  misc_feature (456)..(456): n includes a, c, g, or t, or contains no nucleotide
  misc_feature (462)..(462): n includes a, c, g, or t, or contains no nucleotide
  misc_feature (470)..(470): n includes a, c, g, or t, or contains no nucleotide
ctgaggatcgtgaccagcacctataaggatgggaagggcgccagatacaaccttgccatcgaggagcactgtacatttggggaccccatcgtttaaggccatgtcactagaagcgcagtttaagaaaaggcatggtgacccatgaccagaggggatcctatggttatgtgtgccaggctggctggcaggaactggggtggctatcaatattggatggcgaggacagcgtggtactggctgcgagtgttcctgagagttgaaagtgggatgacttatgacannnnnnnnnnnnnnnnnnnnnnnnnnnnnnnnnnnnnnnnnnntggtgaagaagtgacctgcnacacaggaaacgatgggacctcagtcttcttcagcagaggacttgatattttgtatttggcaactgtgggcaataatatggcatttaagaggtgaaagagttcagacttatcnccattnttatgtcnctttagaatcaagggtgggggagggagggagggagttggcagtttcaaatcgcccaagt

SEQ ID NO: 4643 - DNA, 525 bp, Homo sapiens
  misc_feature (48)..(66): n includes a, c, g, or t, or contains no nucleotide
  misc_feature (119)..(119): n includes a, c, g, or t, or contains no nucleotide
  misc_feature (132)..(134): n includes a, c, g, or t, or contains no nucleotide
  misc_feature (136)..(139): n includes a, c, g, or t, or contains no nucleotide
  misc_feature (141)..(144): n includes a, c, g, or t, or contains no nucleotide
  misc_feature (146)..(147): n includes a, c, g, or t, or contains no nucleotide
  misc_feature (149)..(149): n includes a, c, g, or t, or contains no nucleotide
  misc_feature (151)..(169): n includes a, c, g, or t, or contains no nucleotide
gttcacaggtgacaccttgtttgtggctggctgcgggaagttctatgnnnnnnnnnnnnnnnnnnntgtgtaaagctctgctggaggtcttgggccggctccccccggacacaagagtntactgtggccacnnntnnnncnnnnannancnnnnnnnnnnnnnnnnnnntggagcccggcaatgccgccatccgggagaagctggcctgggccaaggagaagtacagcatcggggagcccacagtgccatccaccctggcagaggagtttacctacaaccccttcatgagagtgagggagaagacggtgcagcagcacgcaggtgagacggacccggtgaccaccatgcgggccgtgcgcagggagaaggaccagttcaagatgccccgggactgaggccgccctgcaccttcagcggatttggggattaggctcttttaggtaactggctttcctgctggtccgtgcgggaaattcagtcttgatttaaccttaattttacagcccttggcttgtgttatcgga

SEQ ID NO: 4644 - DNA, 590 bp, Homo sapiens
  misc_feature (45)..(62): n includes a, c, g, or t, or contains no nucleotide
  misc_feature (167)..(171): n includes a, c, g, or t, or contains no nucleotide
  misc_feature (183)..(183): n includes a, c, g, or t, or contains no nucleotide
  misc_feature (273)..(273): n includes a, c, g, or t, or contains no nucleotide
  misc_feature (367)..(367): n includes a, c, g, or t, or contains no nucleotide
  misc_feature (445)..(446): n includes a, c, g, or t, or contains no nucleotide
ctcacgctgctctgcacatggtgggggcttgtccactgtggtgtnnnnnnnnnnnnnnnnnnttcctcacctcacatctgaccctggagcttggggttggcacctctgccccgacagaatggggctgaatcagctccaggaggaaccaggccctgctctcctgtgtnnnnntcagagaggccnaagaagggaagctttgggcttcggtgggtgcaggctcagcgatgaacatctggctggggcagctcctggggagcatcagggaagaggggnccatgagccggccagcagtggagacggcagtccagtttctctcccctctgacccctagaaggggagttgtagccccatgaactagtttcttgtntgggtcaggaacaagggccggctggggcctggggtgcagctggtgtcagggtatgctgtttgctgatgggcagggacnnccctgcagggtctcgggctctgagcccaggacattccctgccccttgctcaccttggctgtgggctgtgaacattccgggaccctgggcatcttatctaggtccgtgcagcccaagggtcagccctcttgactgtcacatgctg

SEQ ID NO: 4645 - DNA, 349 bp, Homo sapiens
  misc_feature (247)..(247): n includes a, c, g, or t, or contains no nucleotide
atgtgaagcactacacccagcagagtcccggtgccctctgtccccactgccggcccatgttctctctccggaggtcaccaaggaatgcacaggtttcgactaccagaaaggggagtccttgggttctttcaaaaaattcgtgaggagagctgtctacagtggaatagggggtctccctggggaatgcaggccaagtccttttattttaacatgatgtccatgaagaggtttgccgtctgggcagccntgtcggcaaggagcgtgcatactgcgtttgtgtaattgtttgctgtatctcccttccctctgagctgtattgttctttaatggctgtcttgcccttccaaaa

SEQ ID NO: 4646 - DNA, 599 bp, Homo sapiens
gctggggctcgagtccaggtcacgctggacggagttccggccgcggccccggggcagccagctcaacttcagctaaatgctaccgagagtgacgacggacgcagcttcttctgcagtgccactctcgaggtggacggcgagttcttgcacaggaacagtagcgtccagctgcgagtcctgtatggtcccaaaattgaccgagccacatgcccccagcacttgaaatggaaagataaaacgagacacgtcctgcagtgccaagccaggggcaacccgtaccccgagctgcggtgtttgaaggaaggctccagccgggaggtgccggtggggatcccgttcttcgtcaacgtaacacataatggtacttatcagtgccaagcgtccagctcacgaggcaaatacaccctggtcgtggtgatggacattgaggctgggagctcccactttgtccccgtcttcgtggcggtgttactgaccctgggcgtggtgactatcgtactggccttaatgtacgtcttcagggagcaccaacggagcggcagttaccatgttagggaggagagcacctatctgcccctcacgtctatgcagccgacaga

SEQ ID NO: 4647 - DNA, 393 bp, Homo sapiens
aaccaagcaagattcacctgtgttttgtgttcatgttcatttgcctcttaaaggcaagggttgaagataaataaggtagcaatgtctatagttttggccttaactatgccaatctaattataattccctgtatttaaaatggtttcttttacttattgaaaggcattttagtgtggtttatgtgtaatattaaagattattcaacacctctcacatcttacagatctataaggtcacatgcttttaaaatagtagcaagttaaacttcactcttgaattctttacaatctaagtcaaactaagttataatttaggattgtctttaaacagccattcagaaacaaaactgtagaactgtgtatttgattgggaatggtgcttttgccaacttaa

SEQ ID NO: 4648 - DNA, 348 bp, Homo sapiens
cctgaaggactttctgcttgtcatcccctttgactgctgggagccagtccaggagtgagaccggccagatgaggctggccaagccggggagctgctctctcatgaaacaagagctagaaactcaggatggtcatcttggagggaccaaggggtgggccacagccatggtgggagtggcctggacctgccctgggccacactgaccctgatacaggcatggcagaagaatgggaatattttatactgacagaaatcagtaatatttatatatttatatttttaaaatatttatttatttatttatttaagttcatattccatatttattcaagatgttttaccgtaata

SEQ ID NO: 4649 - DNA, 306 bp, Homo sapiens
  misc_feature (199)..(199): n includes a, c, g, or t, or contains no nucleotide
  misc_feature (257)..(271): n includes a, c, g, or t, or contains no nucleotide
tgggtccctggacacggccttgaagccaaccttctttggaggagcaacagcagcagccttggccgacgcgtccaactcccaaggctgccgtggagggcaggggggtggtgcttgcctggatgtggccccgagtgcctcccctccctccctctgtgggggagtctcccgcctgaacctgaagatggagcagggcccccgnttcgccctggagcctcttcctgtgcctggctcaagctggctgcctgtcagtcttgggnnnnnnnnnnnnnnnctcctcagcctctgccccagttctgggagaagttt

SEQ ID NO: 4650 - DNA, 408 bp, Homo sapiens
  misc_feature (26)..(26): n includes a, c, g, or t, or contains no nucleotide
  misc_feature (33)..(33): n includes a, c, g, or t, or contains no nucleotide
  misc_feature (39)..(39): n includes a, c, g, or t, or contains no nucleotide
  misc_feature (49)..(49): n includes a, c, g, or t, or contains no nucleotide
  misc_feature (62)..(62): n includes a, c, g, or t, or contains no nucleotide
  misc_feature (87)..(87): n includes a, c, g, or t, or contains no nucleotide
  misc_feature (121)..(121): n includes a, c, g, or t, or contains no nucleotide
  misc_feature (124)..(124): n includes a, c, g, or t, or contains no nucleotide
  misc_feature (183)..(183): n includes a, c, g, or t, or contains no nucleotide
  misc_feature (215)..(215): n includes a, c, g, or t, or contains no nucleotide
  misc_feature (226)..(226): n includes a, c, g, or t, or contains no nucleotide
  misc_feature (234)..(234): n includes a, c, g, or t, or contains no nucleotide
  misc_feature (239)..(239): n includes a, c, g, or t, or contains no nucleotide
  misc_feature (375)..(376): n includes a, c, g, or t, or contains no nucleotide
atcatcaagggagtgcgcaaaagcanatgcagncagaancgcagggggncctctgtaaggcnacatggaggtgatggtgtttcttangagagaagatcactgaagaaacttctgctttaantgnctttacaaagctggcaatattacaatccttgacctcagtgaaagcagtcatcttcagcnttttccagccctatagccaccccaagtgtggnttatgcctccntcgattgnctccngtactctaacatctagctggcttccctgtctattgccttttcctgtatctattttcctctatttcctatcattttattatcaccatgcaatgcctctggaataaaacatacaggagtctgtctctgctatggaatnnccccatggggcatctcttgtgtacttattgtt

SEQ ID NO: 4651 - DNA, 510 bp, Homo sapiens
  misc_feature (38)..(38): n includes a, c, g, or t, or contains no nucleotide
  misc_feature (65)..(65): n includes a, c, g, or t, or contains no nucleotide
  misc_feature (69)..(69): n includes a, c, g, or t, or contains no nucleotide
  misc_feature (74)..(105): n includes a, c, g, or t, or contains no nucleotide
  misc_feature (193)..(207): n includes a, c, g, or t, or contains no nucleotide
  misc_feature (453)..(453): n includes a, c, g, or t, or contains no nucleotide
  misc_feature (466)..(468): n includes a, c, g, or t, or contains no nucleotide
  misc_feature (470)..(476): n includes a, c, g, or t, or contains no nucleotide
  misc_feature (480)..(480): n includes a, c, g, or t, or contains no nucleotide
  misc_feature (484)..(485): n includes a, c, g, or t, or contains no nucleotide
attgggctcctgtgcccagagcgtccacagcaccattncccagtgtagactcccagtcttctccncatngctgnnnnnnnnnnnnnnnnnnnnnnnnnnnnnnnnattttgttttgcttgttaagcaaaggaatgtcacatacctctgtccagctttttaggaaatacatttcgcctattgcgactttttccnnnnnnnnnnnnnnntagaaagtaggtggaactcacacaaatggcattccagagtctgccatactccgtctcctccagctgctggataatacagaggaacttcaacttctacagggaacagtggttggccaggctgcagtataactgaagcatgccttggagagagcagacactgtgggggccagggccatctccctttaatgtgttcatgttaaaacctatttgagtgtaagacttgccctttctaacaataaatgctcngtgtttaagttcnnnannnnnnntggntggnnggctggctctcagtctgtcaagtca

SEQ ID NO: 4652 - DNA, 576 bp, Homo sapiens
  misc_feature (115)..(115): n includes a, c, g, or t, or contains no nucleotide
  misc_feature (122)..(122): n includes a, c, g, or t, or contains no nucleotide
  misc_feature (143)..(192): n includes a, c, g, or t, or contains no nucleotide
gtggcatcaacaattatacccagcactgtaagcatcaaaatacctttctgcatgactctttccagaatgtggctgctgtctgtgatttgctcagcattgtctgcaaaaatcgtcngcacaantgccaccagagctcaaagccnnnnnnnnnnnnnnnnnnnnnnnnnnnnnnnnnnnnnnnnnnnnnnnnnngctatagtgctgctgcccagtacaaattcttcattgttgcctgtgacccccctcagaagagcgatcccccctacaagttggttcctgtacacttagatagtattctctaaggcatccactgcatttcctttcatttgacatagcttctgttacaattgcatccacgttttcttttcttttgttgattttcttgttcccgtagaagaaagaagaaaggtgtttggagaattcgagtgcctaggatgccagaccagagttgagacaaaaagaaataagattattttctgctttgtagttctgtacttttcgagagaagggaatagggaagacagcaaagaaagattcagatttctaaccctgcaacttttgccaagctttattgcc

SEQ ID NO: 4653 - DNA, 577 bp, Homo sapiens
  misc_feature (26)..(40): n includes a, c, g, or t, or contains no nucleotide
  misc_feature (128)..(142): n includes a, c, g, or t, or contains no nucleotide
  misc_feature (176)..(176): n includes a, c, g, or t, or contains no nucleotide
  misc_feature (178)..(179): n includes a, c, g, or t, or contains no nucleotide
  misc_feature (183)..(183): n includes a, c, g, or t, or contains no nucleotide
  misc_feature (186)..(187): n includes a, c, g, or t, or contains no nucleotide
  misc_feature (189)..(189): n includes a, c, g, or t, or contains no nucleotide
  misc_feature (191)..(191): n includes a, c, g, or t, or contains no nucleotide
  misc_feature (193)..(198): n includes a, c, g, or t, or contains no nucleotide
  misc_feature (200)..(205): n includes a, c, g, or t, or contains no nucleotide
  misc_feature (207)..(212): n includes a, c, g, or t, or contains no nucleotide
  misc_feature (216)..(218): n includes a, c, g, or t, or contains no nucleotide
  misc_feature (220)..(256): n includes a, c, g, or t, or contains no nucleotide
  misc_feature (262)..(262): n includes a, c, g, or t, or contains no nucleotide
  misc_feature (376)..(390): n includes a, c, g, or t, or contains no nucleotide
gactgctggcctgttcctaatgagcnnnnnnnnnnnnnnnggtagaggttggggtttatgaaccccaactctggcttaaagatcttgctgtggctctgttatgttctgaggccttgggattagcctcnnnnnnnnnnnnnnnctgattttctagtctgtggatcagctatgccttngnncacntcnntntntnnnnnntnnnnnntnnnnnntgtnnncnnnnnnnnnnnnnnnnnnnnnnnnnnnnnnnnnnnnnctaggnagttgggaggaggaaccaaagtgaaccatccttcatttattcagtcattcgttcatctgtcaaacacgtatttggacatcaaggttgcagagatgaacaatgcatggatttcannnnnnnnnnnnnnnaaacctagtggagagaacacatggtacaatcgtaacacatgaaggacaagtaagtgctgcagtaaaggtactaataacatgttccttggaacagaggaagaaaaaccacgaaaccatggaaattagggaagcctttacagagggtgtgacaaaactcaatttgacattttcaagctatgtacaatga

SEQ ID NO: 4654 - DNA, 325 bp, Homo sapiens
  misc_feature (27)..(41): n includes a, c, g, or t, or contains no nucleotide
  misc_feature (280)..(281): n includes a, c, g, or t, or contains no nucleotide
caagaaagcttcttatcaaaagaagcnnnnnnnnnnnnnnntacctcattatctactgcagaaaagaagacgagaatgcaaccatacctagatggacttttccacaagctaaagctggcctcttgatctcattcagattccaaagagaatcatttacaagttaatttctgtctccttggtccattccttctctctaataatcatttactgttcctcaaagaattgtctacattacccatctcctcttttgcctctgagaaagagtatataagcttctgtnncccactggggggttggggtaatattctgtggtcctcagccctgt

SEQ ID NO: 4655 - DNA, 358 bp, Homo sapiens
  misc_feature (126)..(141): n includes a, c, g, or t, or contains no nucleotide
tctatgccaccagctccagacagtaactaagacttctttgcagaataaagtatttctaaaggttgacaagtgtattacgaagacaagatccatgatggctctcttagtccaacttctttcactttnnnnnnnnnnnnnnnngaagcttcagatggaaaataacggatgggtctcagttacaaataaggacactatggatagtaaaacttgagaagcttttggggtcagatctctggaacatcatgtgatgaagctgacatttttaaaaatcaaatgatcctttatcttttcagaaattcatcaattttataaagaaaacaatattgaaattttgctctattttctgatcatgaaactg

SEQ ID NO: 4656 - DNA, 501 bp, Homo sapiens
  misc_feature (35)..(35): n includes a, c, g, or t, or contains no nucleotide
  misc_feature (50)..(66): n includes a, c, g, or t, or contains no nucleotide
  misc_feature (277)..(429): n includes a, c, g, or t, or contains no nucleotide
ggtctgcctgcacactctggggagccaggggcccnagcaccctccaggannnnnnnnnnnnnnnnncctggctgctggagtacatgtgttcacaagggttactcctcaaaacccccagttctcactcatgtccccaactcaaggctagaaaacagcaagatggagaaataatgttctgctgcgtccccaccgtgacctgcctggcctcccctgtctcagggagcaggtcacaggtcaccatggggaattctagcccccactggggggatgttacaannnnnnnnnnnnnnnnnnnnnnnnnnnnnnnnnnnnnnnnnnnnnnnnnnnnnnnnnnnnnnnnnnnnnnnnnnnnnnnnnnnnnnnnnnnnnnnnnnnnnnnnnnnnnnnnnnnnnnnnnnnnnnnnnnnnnnnnnnnnnnnnnnnnnnnnntaacagaaacactcccagggactctggggagaggctgaggacaaatacctgctgtcactccagaggacattt

SEQ ID NO: 4657 - DNA, 582 bp, Homo sapiens
  misc_feature (29)..(43): n includes a, c, g, or t, or contains no nucleotide
  misc_feature (164)..(178): n includes a, c, g, or t, or contains no nucleotide
  misc_feature (352)..(356): n includes a, c, g, or t, or contains no nucleotide
  misc_feature (411)..(411): n includes a, c, g, or t, or contains no nucleotide
  misc_feature (425)..(447): n includes a, c, g, or t, or contains no nucleotide
  misc_feature (468)..(509): n includes a, c, g, or t, or contains no nucleotide
  misc_feature (531)..(531): n includes a, c, g, or t, or contains no nucleotide
  misc_feature (557)..(557): n includes a, c, g, or t, or contains no nucleotide
ggacaccattagaaactatccagaagaannnnnnnnnnnnnnngctaagggatccatggggccgcaatgaagcttggagatacatgggtggctttgcaaagagtgtttccttttctgatgtattctttaaaggattcaaatggggatttgctgcatttgtggtnnnnnnnnnnnnnnnatattacctggagtccctgaataaagataagaagcatcactgaagataatacctggaagcatcatagtggtttcttaactctccaaaataagatttcttctctgtagcctacttgtctggtttatcccttacagaatattagtaagatttaatcaattaaaatatatatatatnnnnnaaaaaaaaaaaaaaaaaaaaaaaaagctcttaatacggccgacgctatcccttgngagggtaattactnnnnnnnnnnnnnnnnnnnnnnngaactatggtccactaccctnnnnnnnnnnnnnnnnnnnnnnnnnnnnnnnnnnnnnnnnnngcgaagaggcctctctcggggnttgggtgaatacacggctgttttctngtgctgcaaggtgtggtttcccaca

SEQ ID NO: 4658 - DNA, 30 bp, Homo sapiens
gcccttttgcttcaggggatgattgccgcc

SEQ ID NO: 4659 - DNA, 65 bp, Homo sapiens
ggaaggcacgaagtctctaaagcatccagaagacccctacaccagggtctggtccgctcctattc

SEQ ID NO: 4660 - DNA, 286 bp, Homo sapiens
tcacacactgtagatggtcactcccttcatgtccatgttagctcatggtgtaagatgatgtcttgtcagtattactgttttgctaagccgcttcattcatgcctacacaatttttttttaaaagggaactttagttaattaagtgataagggacttaaatatgaattagaatggtgcagaaagagataccttttctggatattttaaagtttaaaggtcagtttctcttaatctgattatgtgcacatatgaaaatggcacatcatatacatgtaaaatcaggcag

SEQ ID NO: 4661 - DNA, 502 bp, Homo sapiens
  misc_feature (58)..(396): n includes a, c, g, or t, or contains no nucleotide
gccaaacccttgtcagtgacagtattttggttcttagttctcactgttccctctgctnnnnnnnnnnnnnnnnnnnnnnnnnnnnnnnnnnnnnnnnnnnnnnnnnnnnnnnnnnnnnnnnnnnnnnnnnnnnnnnnnnnnnnnnnnnnnnnnnnnnnnnnnnnnnnnnnnnnnnnnnnnnnnnnnnnnnnnnnnnnnnnnnnnnnnnnnnnnnnnnnnnnnnnnnnnnnnnnnnnnnnnnnnnnnnnnnnnnnnnnnnnnnnnnnnnnnnnnnnnnnnnnnnnnnnnnnnnnnnnnnnnnnnnnnnnnnnnnnnnnnnnnnnnnnnnnnnnnnnnnnnnnnnnnnnnnnnnnnnnnnnnnnnnnnnnnnnnnnnnnnnnnnnnnnnnnnnnnnnnctttagcttgaaaaggtgaccttgcaacttcatgtcaacttctggctcctcaaacagtaggttggcagtaaggcagggtcccatttctcactgagaagattgtgaa

SEQ ID NO: 4662 - DNA, 572 bp, Homo sapiens
  misc_feature (123)..(171): n includes a, c, g, or t, or contains no nucleotide
  misc_feature (274)..(305): n includes a, c, g, or t, or contains no nucleotide
  misc_feature (434)..(452): n includes a, c, g, or t, or contains no nucleotide
  misc_feature (466)..(470): n includes a, c, g, or t, or contains no nucleotide
  misc_feature (478)..(478): n includes a, c, g, or t, or contains no nucleotide
  misc_feature (488)..(496): n includes a, c, g, or t, or contains no nucleotide
  misc_feature (498)..(498): n includes a, c, g, or t, or contains no nucleotide
  misc_feature (503)..(505): n includes a, c, g, or t, or contains no nucleotide
gctttggtcagttcatcctcactccccacatcatgacccgggccaagaagaagatggtggtgatgcacccgatgccccgtgtcaacgagataagcgtggaagtggactcggatccccgcgcannnnnnnnnnnnnnnnnnnnnnnnnnnnnnnnnnnnnnnnnnnnnnnnntagccaccgtgctgggccgtttctagggcctggcttcctcagcctcttctctttaggcccagctgctgggcaaggaattccagtgcctcctacgggggcagcnnnnnnnnnnnnnnnnnnnnnnnnnnnnnnnncacatgtgctgaccacacttcaggctctggactggagctctctggcatgggggtggggcctcagatgctggggcccagtctgccccatcttcattcctgcaccttaaacctgtacagtcatttttctannnnnnnnnnnnnnnnnnnagctgtcccttgannnnnaaaaaaanaaaaaaaaannnnnnnnnanaaaannnagcagattcccaaattataagagcagcctcaccaggcagggctctggctagggctgcgtgcccacac

SEQ ID NO: 4663 - DNA, 107 bp, Homo sapiens
ctctgcagcttccaggctggcgtgcagcatcagcatccctagaaagccatgtgcagccaccagtccattgggcaggcagatgttcctaataaagcttctgttccgtg

SEQ ID NO: 4664 - DNA, 401 bp, Homo sapiens
cactcctacaaaatcaaagtattgtccagacaagagtcactggcccctgctccagcttctgggtatccagagagcactgcacttccccaaaacggaaggggcccctgggcagtgggttttgggcaaattccctttctttgcatccacaatgtgggtcggagcttgggggcaggtcctgggagtgggaagcctcttccttgtgtctttcgctccacttttagctcatcgcaccaatattgcagacttggaaggaagcataacttccatttcacaaaggggaaactgaggtgcgggtgcgggcctggggacggccgtcccatggcttccatctgagccacctcgggaccccagcactcctggcgccctcttcttcatcgcttggcctatgacaggtcaccgtg

SEQ ID NO: 4665 - DNA, 591 bp, Homo sapiens
  misc_feature (53)..(53): n includes a, c, g, or t, or contains no nucleotide
  misc_feature (60)..(60): n includes a, c, g, or t, or contains no nucleotide
  misc_feature (87)..(87): n includes a, c, g, or t, or contains no nucleotide
  misc_feature (95)..(95): n includes a, c, g, or t, or contains no nucleotide
  misc_feature (103)..(104): n includes a, c, g, or t, or contains no nucleotide
  misc_feature (122)..(122): n includes a, c, g, or t, or contains no nucleotide
  misc_feature (179)..(179): n includes a, c, g, or t, or contains no nucleotide
  misc_feature (186)..(186): n includes a, c, g, or t, or contains no nucleotide
aaggctgtggcacagaacatggactctgtgtttaaggagctcttgggaaaganctctgtnccgccagggccttgggccagcatctancacctctncccagtcnngggccccgaagcccaaanggccccgcccagcagccgcctgggcaggaacaaaggcttctcccggggccctggggncccagcntcaccctcagcttcccacccccagggcctagacacgacccccaagccacactgaggtgccgctgctggagatgcgtgcccccggcggctacccgctggaccggccactctccccagcccccttgcttctctccagccctgtccagcaagtgcagggtgcctgcacttcaccctgtgcagagaggtgggatggggccgtgcacacagggatgcccgctccacatcctgcctgcccctcagccctggcccaggccccttttggaggcagctgaggaaggatgctggggaaagccctcttctgcagctttgtggaaggctgatcagtggctgctgggtggcgggtacccttgctcagatgcctggcagggctgggtggcgattcataaagacctcgtgttgattcccc

SEQ ID NO: 4666 - DNA, 517 bp, Homo sapiens
atggttcagtcctagcaagaagcgagaattctgagatcctccagaaagtcgagcagcacccacctccaacctcgggccagtgtcttcaggctttactggggacctgcgagctggcctaatgtggtggcctgcaagccaggccatccctgggcgccacagacgagctccgagccaggtcaggcttcggaggccacaagctcagcctcaggcccaggcactgattgtggcagaggggccactacccaaggtctagctaggcccaagacctagttacccagacagtgagaagcccctggaaggcagaaaagttgggagcatggcagacagggaagggaaacattttcagggaaaagacatgtatcacatgtcttcagaagcaagtcaggtttcatgtaaccgagtgtcctcttgcgtgtccaaaagtagcccagggctgtagcacaggcttcacagtgattttgtgttcagccgtgagtcacactacatgcccccgtgaagctgggcattggtgacgtcc

SEQ ID NO: 4667 - DNA, 592 bp, Homo sapiens
gaagtggactctggaaacgacatttatggcaaccctatcaagaggatccagtatgagatcaagcagataaagatgttcaaagggcctgagaaggatatagagtttatctacacggccccctcctcggcagtgtgtggggtctcgctggacgttggaggaaagaaggaatatctcattgcaggaaaggccgagggggacggcaagatgcacatcaccctctgtgacttcatcgtgccctgggacaccctgagcaccacccagaagaagagcctgaaccacaggtaccagatgggctgcgagtgcaagatcacgcgctgccccatgatcccgtgctacatctcctccccggacgagtgcctctggatggactgggtcacagagaagaacatcaacgggcaccaggccaagttcttcgcctgcatcaagagaagtgacggctcctgtgcgtggtaccgcggcgcggcgccccccaagcaggagtttctcgacatcgaggacccataagcaggcctccaacgcccctgtggccaactgcaaaaaaagcctccaagggtttcgactggtccagctctgacatcccttcctggaaaca

SEQ ID NO: 4668 - DNA, 448 bp, Homo sapiens
  misc_feature (26)..(26): n includes a, c, g, or t, or contains no nucleotide
  misc_feature (28)..(30): n includes a, c, g, or t, or contains no nucleotide
  misc_feature (270)..(285): n includes a, c, g, or t, or contains no nucleotide
  misc_feature (288)..(288): n includes a, c, g, or t, or contains no nucleotide
  misc_feature (298)..(298): n includes a, c, g, or t, or contains no nucleotide
  misc_feature (421)..(422): n includes a, c, g, or t, or contains no nucleotide
ttcagacaccccttatgctccaaggncnnnatgtgagccagcggggggtgcatgggaaactgcaccccacaacccacatcctccatcctgactgcagcatggggttccccggcaggggtgggaggcagcaggggtcagcctgggcaggaacctctcccaactctgtccaggtgttcagacctcttggcccaacctgctcaccccaccgggttcactgtccttgtggggctggagagatgggcataagtcaggaacttgggaggaccaccnnnnnnnnnnnnnnnngangccctggggncctgccggaagggagccccctgctcctcccaacaaactccagaacagcagaaagcgggtgctgtagaggagcactcagctcacggggagggagctcttggctgagcttctacagggctgaganntgcgctttggggacttcagccttcct

SEQ ID NO: 4669 - DNA, 526 bp, Homo sapiens
  misc_feature (26)..(41): n includes a, c, g, or t, or contains no nucleotide
  misc_feature (97)..(113): n includes a, c, g, or t, or contains no nucleotide
  misc_feature (137)..(138): n includes a, c, g, or t, or contains no nucleotide
  misc_feature (141)..(141): n includes a, c, g, or t, or contains no nucleotide
  misc_feature (143)..(143): n includes a, c, g, or t, or contains no nucleotide
  misc_feature (145)..(146): n includes a, c, g, or t, or contains no nucleotide
  misc_feature (149)..(185): n includes a, c, g, or t, or contains no nucleotide
  misc_feature (232)..(247): n includes a, c, g, or t, or contains no nucleotide
  misc_feature (252)..(252): n includes a, c, g, or t, or contains no nucleotide
  misc_feature (258)..(259): n includes a, c, g, or t, or contains no nucleotide
  misc_feature (431)..(450): n includes a, c, g, or t, or contains no nucleotide
agccttttaaatgctcccactgtgannnnnnnnnnnnnnnntctgaccacctggccctgcacatgaagaggcacctctgagggagcagagaggtggnnnnnnnnnnnnnnnnnggcttccaggctgagagccggccnnggnangnnggnnnnnnnnnnnnnnnnnnnnnnnnnnnnnnnnnnnnntacccagttgcctccagggcctctccttggaaggtcttttgagggcnnnnnnnnnnnnnnnngaagnggcatnncacccgtggtgcatggtatgtgggtgaccctggactcgccactggtacccgcccttccgagcggcgcctaagcctttgccgtgagcatgcacactgagaatgctaatggttgggttgattgtatgttgaggatctattactgaccgtatgatgaggccaactttttttcctnnnnnnnnnnnnnnnnnnnngagatggaaaaaaagtagtttgaatgttttgtgtgtaaggagtataccatgagatgagatgaccaccaatcatttc

SEQ ID NO: 4670 - DNA, 494 bp, Homo sapiens
  misc_feature (57)..(71): n includes a, c, g, or t, or contains no nucleotide
  misc_feature (151)..(408): n includes a, c, g, or t, or contains no nucleotide
  misc_feature (418)..(434): n includes a, c, g, or t, or contains no nucleotide
tgcctgagggcctagctcaccacagcacatcctccaggatctagccttctatctacnnnnnnnnnnnnnnntttatggtggttcagaagaatgatgactcctctttgctgagaactgttcatccttcttcaagaagaagcttgccaggccnnnnnnnnnnnnnnnnnnnnnnnnnnnnnnnnnnnnnnnnnnnnnnnnnnnnnnnnnnnnnnnnnnnnnnnnnnnnnnnnnnnnnnnnnnnnnnnnnnnnnnnnnnnnnnnnnnnnnnnnnnnnnnnnnnnnnnnnnnnnnnnnnnnnnnnnnnnnnnnnnnnnnnnnnnnnnnnnnnnnnnnnnnnnnnnnnnnnnnnnnnnnnnnnnnnnnnnnnnnnnnnnnnnnnnnnnnnnnnnnnnnnnnnnnnnnnnnnnnttctgtctcnnnnnnnnnnnnnnnnnagaagcttgtctaattgacttgcctaaaaaatgcagtgactccaaacaacatttgacctg

SEQ ID NO: 4671 - DNA, 344 bp, Homo sapiens
  misc_feature (26)..(26): n includes a, c, g, or t, or contains no nucleotide
  misc_feature (61)..(61): n includes a, c, g, or t, or contains no nucleotide
  misc_feature (112)..(112): n includes a, c, g, or t, or contains no nucleotide
  misc_feature (167)..(167): n includes a, c, g, or t, or contains no nucleotide
  misc_feature (177)..(177): n includes a, c, g, or t, or contains no nucleotide
  misc_feature (188)..(188): n includes a, c, g, or t, or contains no nucleotide
  misc_feature (206)..(230): n includes a, c, g, or t, or contains no nucleotide
  misc_feature (266)..(266): n includes a, c, g, or t, or contains no nucleotide
tgtatgtaggtctcacagatttcaangcctggctactggattggtgtccgctatgatgagnccactggggaaaaatgatggcagtgtgaatgggaaacgctacttcgaatgnccaggccaagtatggcgcctttgtcaagccagcagtcgtgacggtgggggacttncccggagganggactacgggnttggacgagatatgacannnnnnnnnnnnnnnnnnnnnnnnntcctagctcagccactgactgcccctcctgtgtgtncccatggcccttttctcctgaccccattttaattttattcattttttcctttgccattgatttttgagactcatgcat

SEQ ID NO: 4672 - DNA, 561 bp, Homo sapiens
  misc_feature (27)..(27): n includes a, c, g, or t, or contains no nucleotide
  misc_feature (61)..(61): n includes a, c, g, or t, or contains no nucleotide
  misc_feature (376)..(376): n includes a, c, g, or t, or contains no nucleotide
tccttagccttgctcaggtgcaagtgnccccagggggcggggtgcagaagaatccgagtgntttgccaggcttaaggagaggagaaactgagaaatgaatgctgagacccccggagcaggggtctgagccacagccgtgctcgcccacaaactgatttctcacggcgtgtcaccccaccagggcgcaagcctcactattacttgaactttccaaaacctaaagaggaaaagtgcaatgcgtgttgtacatacagaggtaactatcaatatttaagtttgttgctgtcaagattttttttgtaacttcaaatatagagatatttttgtacgttatatattgtattaagggcattttaaaagcaattatattgtcctncccctattttaagacgtgaatgtctcagcgaggtgtaaagttgttcgccgcgtggaatgtgagtgtgtttgtgtgcatgaaagagaaagactgattacctcctgtgtggaagaaggaaacaccgagtctctgtataatctatttacataaaatgggtgatatgcgaacagcaaaccaataaactg

SEQ ID NO: 4673 - DNA, 475 bp, Homo sapiens
  misc_feature (65)..(66): n includes a, c, g, or t, or contains no nucleotide
  misc_feature (69)..(69): n includes a, c, g, or t, or contains no nucleotide
  misc_feature (71)..(73): n includes a, c, g, or t, or contains no nucleotide
  misc_feature (75)..(78): n includes a, c, g, or t, or contains no nucleotide
  misc_feature (81)..(82): n includes a, c, g, or t, or contains no nucleotide
  misc_feature (85)..(88): n includes a, c, g, or t, or contains no nucleotide
  misc_feature (90)..(90): n includes a, c, g, or t, or contains no nucleotide
  misc_feature (92)..(93): n includes a, c, g, or t, or contains no nucleotide
  misc_feature (95)..(96): n includes a, c, g, or t, or contains no nucleotide
  misc_feature (98)..(100): n includes a, c, g, or t, or contains no nucleotide
  misc_feature (103)..(104): n includes a, c, g, or t, or contains no nucleotide
  misc_feature (309)..(396): n includes a, c, g, or t, or contains no nucleotide
aatggcttcaaggttacttcgcggagctggaacgctggccgcgcaggccctgagggctcgcggcnncantnnngnnnncgnnatnnnncncnntnncnnnctnnaggtggtgttcccactgatgaagagcaggcgactgggttggagagggagatcatgctggctgcaaagaagggactggacccatacaatgtactggccccaaagggagcttcaggcaccagggaagaccctaatttagtcccctccatctccaacaagagaatagtaggctgcatctgtgaagaggacaataccagcgtcgtctgnnnnnnnnnnnnnnnnnnnnnnnnnnnnnnnnnnnnnnnnnnnnnnnnnnnnnnnnnnnnnnnnnnnnnnnnnnnnnnnnnnnnnnnncctgcactaaattactcaaaatgtgctgtaaagtttcttctttccagtaaagactagccattgcattggctccttctcc

SEQ ID NO: 4674 - DNA, 196 bp, Homo sapiens
atcagggtatttgttccaccttggccaggcctcctcggagaagcttgtcccccgtgtgggagggacggagccggactggacatggtcactcagtaccgcctgcagtgtcgccatgactgatcatggctcttgcatttttgggtaaatggagacttccggatcctgtcagggtgtcccccatgcctggaagaggagc

SEQ ID NO: 4675 - DNA, 319 bp, Homo sapiens
  misc_feature (160)..(160): n includes a, c, g, or t, or contains no nucleotide
  misc_feature (162)..(191): n includes a, c, g, or t, or contains no nucleotide
  misc_feature (228)..(243): n includes a, c, g, or t, or contains no nucleotide
  misc_feature (245)..(259): n includes a, c, g, or t, or contains no nucleotide
aggccaggtgtattccgaacttaagtaccacccagagatgagattcttccactggttcagcaagtggaggaagctgcatcgtgaccaggagtatgaggtcacctggtacatatcctggagcccctgcacaaagtgtacaagggatatggccacgttcctngnnnnnnnnnnnnnnnnnnnnnnnnnnnnnnttgttgcccgcctctactacttctgggacccagattnnnnnnnnnnnnnnnnannnnnnnnnnnnnnngagacggtccgcgtgccaccatgaagatcatgaattatgacgaatttcagcactgttgga

SEQ ID NO: 4676 - DNA, 581 bp, Homo sapiens
  misc_feature (78)..(78): n includes a, c, g, or t, or contains no nucleotide
  misc_feature (116)..(116): n includes a, c, g, or t, or contains no nucleotide
  misc_feature (121)..(121): n includes a, c, g, or t, or contains no nucleotide
  misc_feature (126)..(126): n includes a, c, g, or t, or contains no nucleotide
  misc_feature (130)..(131): n includes a, c, g, or t, or contains no nucleotide
  misc_feature (133)..(149): n includes a, c, g, or t, or contains no nucleotide
  misc_feature (166)..(166): n includes a, c, g, or t, or contains no nucleotide
  misc_feature (169)..(191): n includes a, c, g, or t, or contains no nucleotide
  misc_feature (197)..(197): n includes a, c, g, or t, or contains no nucleotide
  misc_feature (219)..(219): n includes a, c, g, or t, or contains no nucleotide
  misc_feature (230)..(230): n includes a, c, g, or t, or contains no nucleotide
  misc_feature (239)..(239): n includes a, c, g, or t, or contains no nucleotide
  misc_feature (261)..(261): n includes a, c, g, or t, or contains no nucleotide
  misc_feature (272)..(272): n includes a, c, g, or t, or contains no nucleotide
  misc_feature (299)..(317): n includes a, c, g, or t, or contains no nucleotide
  misc_feature (425)..(426): n includes a, c, g, or t, or contains no nucleotide
cccacgtggtagtgggagatgttctgcaggcagccgatgtggacaagaccgtggctgggcaggacgctgtcatcgtgntgctgggcacccgcaatgacctcagtcccacgacagtnatgtnccgangggnngnnnnnnnnnnnnnnnnngccatgaaggctcatgntgnnnnnnnnnnnnnnnnnnnnnnnacctcnggctttcctgctctgggacccntaccaaggtgncccccacgnactgcaggctgtgactgatganccacatccggnatgcacaaggtgctgcgggaatcaggnnnnnnnnnnnnnnnnnnnatgccgccacacataggagaccagccactaactggggcgtacacagtgaccctggatggacgagggccctcaagggtcatctccaaacatgacctgggccatttcatnntgcgctgcctcaccaccgatgagtacgacggacacagcacctacccctcccaccagtaccagtagcactctgtccccatctgggagggtggcattctgggacatgaggagcaaaggaagggggcaataaatgttgagccaagagcttcaaattac

SEQ ID NO: 4677 - DNA, 525 bp, Homo sapiens
  misc_feature (26)..(52): n includes a, c, g, or t, or contains no nucleotide
  misc_feature (57)..(58): n includes a, c, g, or t, or contains no nucleotide
  misc_feature (72)..(72): n includes a, c, g, or t, or contains no nucleotide
  misc_feature (79)..(79): n includes a, c, g, or t, or contains no nucleotide
  misc_feature (139)..(139): n includes a, c, g, or t, or contains no nucleotide
  misc_feature (141)..(142): n includes a, c, g, or t, or contains no nucleotide
  misc_feature (472)..(472): n includes a, c, g, or t, or contains no nucleotide
tacaaggcagtttctgggttttacannnnnnnnnnnnnnnnnnnnnnnnnnncaggnnttgaccctcacagnggcaccncccctctctgatcatgaagccctgatggctactctgtttgtgaggcacagccccccacancnnaaccccagctctacccacggaccagcagagaggtcgccgttgatgtgtgtgctaaaggaggcctggacggagctgggtctgggcatggctcaggctcgctggtgggccaccttcgctagctatgtgattggcctggggctgcttctcctggcactgctgtgtgtcctggcggctggaggaggggccggggaagctgccatactgctctggacccccagtgtagggctggtgctgtgggcaggtgcattctacctcttccacgtacaggaggtcaatggcttatatagggcccaggctgagctccagcatgtgctaggaagggcaagggangcccaggatctgggcccagagcctcagccagccctactcctggggcagcagga

SEQ ID NO: 4678 - DNA, 120 bp, Homo sapiens
  misc_feature (71)..(71): n includes a, c, g, or t, or contains no nucleotide
cgaggcttcaggatccagttctcgtaagctgcgactcggcgccctgtactgtggtgcagtgtgacctgcangagatggcgcgcgggcagcgggccatggtcacggtgctggccttcctgt

SEQ ID NO: 4679 - DNA, 458 bp, Homo sapiens
  misc_feature (35)..(35): n includes a, c, g, or t, or contains no nucleotide
  misc_feature (37)..(300): n includes a, c, g, or t, or contains no nucleotide
ctgctgttaggaagccactatgtctggacgtgganannnnnnnnnnnnnnnnnnnnnnnnnnnnnnnnnnnnnnnnnnnnnnnnnnnnnnnnnnnnnnnnnnnnnnnnnnnnnnnnnnnnnnnnnnnnnnnnnnnnnnnnnnnnnnnnnnnnnnnnnnnnnnnnnnnnnnnnnnnnnnnnnnnnnnnnnnnnnnnnnnnnnnnnnnnnnnnnnnnnnnnnnnnnnnnnnnnnnnnnnnnnnnnnnnnnnnnnnnnnnnnnnnnnnnnnnnnnnnnnnnnnnnnnnnnnnnnnnnnnnnnnaaataagcttctaggtcgcgtgaccatcgcgcagggcggtgtcctgcccaacatccaggccgtattgctgcctaagaagacggagagccaccataaggccaagggcaagtgaaatgattactagtcaaatccgtcagtgatcccgagtcccagaaacc

SEQ ID NO: 4680 - DNA, 444 bp, Homo sapiens
  misc_feature (33)..(72): n includes a, c, g, or t, or contains no nucleotide
  misc_feature (84)..(84): n includes a, c, g, or t, or contains no nucleotide
  misc_feature (92)..(92): n includes a, c, g, or t, or contains no nucleotide
  misc_feature (109)..(109): n includes a, c, g, or t, or contains no nucleotide
  misc_feature (340)..(355): n includes a, c, g, or t, or contains no nucleotide
  misc_feature (414)..(414): n includes a, c, g, or t, or contains no nucleotide
  misc_feature (417)..(417): n includes a, c, g, or t, or contains no nucleotide
tggtagccgggaagttgattcactctaagaagnnnnnnnnnnnnnnnnnnnnnnnnnnnnnnnnnnnnnnnngaagttggtggnccgccatncaaagccgccttggctncagggctaatgcgccctgaaggcagagtccagggaccttgacccagcccctctcagcagacgcttcatgataggaaggactgaaaagtcttgtggacacctggtctttccctgatgttctcgtggctgctgttgggggcagagattgacgcccccggtctttgcctctgagcgggagagtctgtgtgtatgtgtcttccccggaatccacaccaccccaccctcctcctgnnnnnnnnnnnnnnnntatctctttgcataccccatgtcttccccagttgtcccctggagtttggggggacatcnccncctcaggcatccttctcaaggggaagc

SEQ ID NO: 4681 - DNA, 533 bp, Homo sapiens
agctatggacagcatctaagtctgcccaggccggccgcccccacccctcggggctcctgaatatcagtcactgttcgtcactcaaatgaatttgctaaatacaacactgatactagattccacagggaaatgggcagactgaaccagtccaggtggtgaattttccaagaacatagtttaagttgattaaaaatgcttttagaatgcaggagcctacttctagctgtattttttgtatgcttaaataaaaataaaattcataaccaaagagaatcccacattagcttgttagtaagctctgaccaagccgagatgcccattctcttagtgatggcggcgttagggtttgagagaagggaatttggctcaacttcagttgagagggtgcagtccagacagcttgactgcttttaaatgaccaaagatgacctgtggtaagcaacctgggcatcttaggaagcagtccctggagaaggcatgttccccagaaaggtctctggagggacaaactcactcagtaaaacataatgtat

SEQ ID NO: 4682 - DNA, 582 bp, Homo sapiens
  misc_feature (26)..(26): n includes a, c, g, or t, or contains no nucleotide
  misc_feature (59)..(59): n includes a, c, g, or t, or contains no nucleotide
  misc_feature (69)..(69): n includes a, c, g, or t, or contains no nucleotide
  misc_feature (467)..(505): n includes a, c, g, or t, or contains no nucleotide
  misc_feature (555)..(555): n includes a, c, g, or t, or contains no nucleotide
aggcagcctctgctctagttgatgtnaggatgagggggcggcctagaccccctgctgcncaggccgttnaggcaacactgggttcctggcttgacagctgtgggctggctgcccttgccagctcagacggctggcgagttttcagcttccctaagggactggcatagggttttgtggggtcaatgccaggaacctgggggaaactggatgcgttttatcctaagaagttcatccctcctgctcttactgtttccggccctggaggagaatgagggaggagagggttttctatgactgtgttagcttttattattagcaagagggctccttttgtaatttgtgcatgaaattcatgtcatttcctgggagaggagagggccgactggagagggtggggggcacactggggaagcaggcagaggtttccttcccttgtaggggggtggggagagtggggagagggggtnnnnnnnnnnnnnnnnnnnnnnnnnnnnnnnnnnnnnnnttttgggttgtgttaaaggtgagaccttcctccattaatgtacaatctcnaactaactgctaataaagtggggttct

SEQ ID NO: 4683 - DNA, 461 bp, Homo sapiens
  misc_feature (27)..(92): n includes a, c, g, or t, or contains no nucleotide
  misc_feature (118)..(119): n includes a, c, g, or t, or contains no nucleotide
  misc_feature (121)..(123): n includes a, c, g, or t, or contains no nucleotide
  misc_feature (126)..(213): n includes a, c, g, or t, or contains no nucleotide
cccccttgttcttcgccagagtaaggnnnnnnnnnnnnnnnnnnnnnnnnnnnnnnnnnnnnnnnnnnnnnnnnnnnnnnnnnnnnnnnnnngaattaaagtatatagcgcaaaagannannnaannnnnnnnnnnnnnnnnnnnnnnnnnnnnnnnnnnnnnnnnnnnnnnnnnnnnnnnnnnnnnnnnnnnnnnnnnnnnnnnnnnnnnnnttattttaaattgttggagttcttttaagaagaatataaattgattattttttttatttaaagggatagttgattcctggggtgttttgaaattaagttggaattaagttgcttaagcatatttatgttgtgagaaaccttaatatgaggtttatcatgccctttttcaagcagatttatgagcagatttctgtcacataagtcgtcttctgcttgagtatcctaatatttcaatgcatcaggggagc

SEQ ID NO: 4684 - DNA, 198 bp, Homo sapiens
  misc_feature (67)..(67): n includes a, c, g, or t, or contains no nucleotide
  misc_feature (69)..(69): n includes a, c, g, or t, or contains no nucleotide
  misc_feature (72)..(127): n includes a, c, g, or t, or contains no nucleotide
  misc_feature (147)..(147): n includes a, c, g, or t, or contains no nucleotide
ccaacattaatgagatccgccagatgtccggggcccagatcaaaattgccaacccagtggaaggctncnctnnnnnnnnnnnnnnnnnnnnnnnnnnnnnnnnnnnnnnnnnnnnnnnnnnnnnnnncagtatctaatcaatgccanggctttcctctgagaagggcatggggtgcagctagaacagtgtaggttccc

SEQ ID NO: 4685 - DNA, 533 bp, Homo sapiens
  misc_feature (26)..(26): n includes a, c, g, or t, or contains no nucleotide
  misc_feature (37)..(37): n includes a, c, g, or t, or contains no nucleotide
  misc_feature (59)..(59): n includes a, c, g, or t, or contains no nucleotide
  misc_feature (66)..(66): n includes a, c, g, or t, or contains no nucleotide
  misc_feature (84)..(84): n includes a, c, g, or t, or contains no nucleotide
  misc_feature (98)..(98): n includes a, c, g, or t, or contains no nucleotide
  misc_feature (148)..(148): n includes a, c, g, or t, or contains no nucleotide
  misc_feature (157)..(157): n includes a, c, g, or t, or contains no nucleotide
  misc_feature (160)..(160): n includes a, c, g, or t, or contains no nucleotide
  misc_feature (415)..(415): n includes a, c, g, or t, or contains no nucleotide
tcctcgtaccctgatccagaactgtnggggccagcanccatccgtctacttacctcccnttcgggnccaagcacacccaggagnaactgtgagacctnggggtgtaaatggtgagacgggtactttggtggacatgaaggaactgggncatatgggnagnccattggctgtgaagctgcagacttataagacagcagtggagacggcagttctgctactgcgaattgatgacatcgtttcaggccacaaaaagaaaggcgatgaccagagccggcaaggcggggctcctgatgctggccaggagtgagtgctaggcaaggctacttcaatgcacagaaccagcagagtctccccttttcctgagccagagtgccaggaacactgtggacgtctttgttcagaagggatcaggttngggggcagcccccagtccctttctgtcccagctcagttttccaaaagacactgacatgtaattcttctctattgtaaggtttccatttagtttgcttccgatgattaaatctaagtca

SEQ ID NO: 4686 - DNA, 421 bp, Homo sapiens
  misc_feature (120)..(121): n includes a, c, g, or t, or contains no nucleotide
  misc_feature (264)..(265): n includes a, c, g, or t, or contains no nucleotide
  misc_feature (374)..(375): n includes a, c, g, or t, or contains no nucleotide
actctgagcaagtcccagatatactacaactcaatgcaatctttaacatgttgaataccaagaactgcccaagtttgaaggacaaaccgaaggtgatcatcatccaggcctgccgtggtnncagccctggtgtggtgtggtttaaagattcagtaggagtttctggaaacctatctttaccaactacagaagagtttgaggatgatgctattaagaaagcccacatagagaaggattttatcgctttctgctcttccacaccanntaatgtttcttggagacatcccacaatgggctctgtttttattggaagactcattgaacatatgcaagaatatgcctgttcctgtgatgtggaggaaattttccgcaannttcgattttcatttgagcagccagatggtagagcgcagatgcccac

SEQ ID NO: 4687 - DNA, 571 bp, Homo sapiens
tgaagcactacaggaggaatgcaccacggcagctctccgccaatttctctcagatttccacagagactgtttgaatgttttcaaaaccaagtatcacactttaatgtacatgggccgcaccataatgagatgtgagccttgtgcatgtgggggaggagggagagagatgtactttttaaatcatgttccccctaaacatggctgttaacccactgcatgcagaaacttggatgtcactgcctgacattcacttccagagaggacctatcccaaatgtggaattgactgcctatgccaagtccctggaaaaggagcttcagtattgtggggctcataaaacatgaatcaagcaatccagcctcatgggaagtcctggcacagtttttgtaaagcccttgcacagctggagaaatggcatcattataagctatgagttgaaatgttctgtcaaatgtgtctcacatctacacgtggcttggaggcttttatggggccctgtccaggtagaaaagaaatggtatgtagagcttagatttccctattgtgacagagccatggtgtgtttgtaata

SEQ ID NO: 4688 - DNA, 467 bp, Homo sapiens
  misc_feature (133)..(133): n includes a, c, g, or t, or contains no nucleotide
  misc_feature (219)..(241): n includes a, c, g, or t, or contains no nucleotide
  misc_feature (243)..(245): n includes a, c, g, or t, or contains no nucleotide
  misc_feature (287)..(287): n includes a, c, g, or t, or contains no nucleotide
  misc_feature (289)..(304): n includes a, c, g, or t, or contains no nucleotide
  misc_feature (390)..(442): n includes a, c, g, or t, or contains no nucleotide
gcacataatctttctttgctgtgactgaaatgtatccctcgtttatcatcccctttgtttgtgattgctgctaaagtcagtagtatcgtttttttaaaaaaaaagtttggtgtttttaaccatgctgttccancaaagatgataccttaaactcccactgcaagcccatgaacttcccagagagtggaacggcttgctcttctttctagaatgtccatnnnnnnnnnnnnnnnnnnnnnnntnnncctattattctgattttaagctgttcctgtgatgaacttagnannnnnnnnnnnnnnnngctgctgtgtccccaggtcttgtgtgggtggcacagatctgggcagttagatagtgctctgtgcctaaggtgaagccacactaggnnnnnnnnnnnnnnnnnnnnnnnnnnnnnnnnnnnnnnnnnnnnnnnnnnnnngaaggtacagccattcagataagtg

SEQ ID NO: 4689 - DNA, 562 bp, Homo sapiens
  misc_feature (135)..(135): n includes a, c, g, or t, or contains no nucleotide
  misc_feature (235)..(249): n includes a, c, g, or t, or contains no nucleotide
gtacagtcgtgatgctcctctgcccccccggcaagacctcaacgcccctgacctctatatccccacgatggccttcattacttacgtgctcctggctgggatggcactgggcattcagaaaaggttctccccggnaggtgctgggcctgtgtgcaagcacagcgctggtgtgggtggtgatggaggtgctggccctgctcctgggcctctacctggccaccgtgcgcagtgaccnnnnnnnnnnnnnnntgctggcctacagtggctacaaatacgtgggaatgatcctcagtgtgctcacggggctgctgttcggcagcgatggctactacgtggcgctggcctggacctcatcggcgctcatgtacttcattgtgcgctctttgcggacagcagccctgggccccgacagcatggggggccccgtcccccggcagcgtctccagctctacctgactctgggagctgcagccttccagcccctcatcatatactggctgactttccacctggtccggtgaccccctggccccagatggcactgagtttttcattcattgaa

SEQ ID NO: 4690 - DNA, 443 bp, Homo sapiens
  misc_feature (38)..(69): n includes a, c, g, or t, or contains no nucleotide
  misc_feature (300)..(300): n includes a, c, g, or t, or contains no nucleotide
  misc_feature (306)..(306): n includes a, c, g, or t, or contains no nucleotide
agctgtgtgaacgtgtatgtacctaggatatgttaaannnnnnnnnnnnnnnnnnnnnnnnnnnnnnnntagaacatgtgtctatctgcttttgcctacgtgacaacacaaatttgggagggtgagacactgcacagaagacagcagcaagtgtgctggcctctctgacatatgctaacccccaaatactctgaatttggagtctgactgtgcccaagtgggtccaagtggctgtgacatctacgtatggctccacacctccaatgctgcctgggagccagggtgagagtctgggtccanggcctngccatgtggccctccagtgtatgagagggccctgcctgctgcatcttttctgttgccccatccaccgccagcttcccttcactcccctatcccattctccctctcaaggcaggggtcatagatcctaagccataaaa

SEQ ID NO: 4691 - DNA, 401 bp, Homo sapiens
  misc_feature (41)..(42): n includes a, c, g, or t, or contains no nucleotide
  misc_feature (176)..(176): n includes a, c, g, or t, or contains no nucleotide
  misc_feature (221)..(221): n includes a, c, g, or t, or contains no nucleotide
  misc_feature (239)..(239): n includes a, c, g, or t, or contains no nucleotide
  misc_feature (253)..(253): n includes a, c, g, or t, or contains no nucleotide
  misc_feature (324)..(350): n includes a, c, g, or t, or contains no nucleotide
cctatttgagggtgtctgtctggagacttagagtttgtcanntgtgtgtgtgtgtttggttaatgtgggtttatgggttttctttctttttttttttttttttttttagtctacattagggggaagtgagcgcctcccatgtgcagacagtgtgtctttatagatttttctaaggntttccccaatgatgtcggtaatttctgatgtttctgaagttcccnggactcacacacccgttncccatctcacttgncccacccagtgtgacaaccctcggtgtggatatacccccgtggactcatggctcttccccacccccacttnnnnnnnnnnnnnnnnnnnnnnnnnnntctctgttgcaaaactcagctaagttcctgcttccaccttgatgttgaaat

SEQ ID NO: 4692 - DNA, 155 bp, Homo sapiens
  misc_feature (46)..(71): n includes a, c, g, or t, or contains no nucleotide
tgaatgctgtcttgacatctcttgccttgtcctccggtatgttctnnnnnnnnnnnnnnnnnnnnnnnnnncccatcactttggctagtgacagggctaattaatttgctttatacattttcttttactttccttttttcctttctggaggcatc

SEQ ID NO: 4693 - DNA, 519 bp, Homo sapiens
  misc_feature (26)..(26): n includes a, c, g, or t, or contains no nucleotide
  misc_feature (37)..(65): n includes a, c, g, or t, or contains no nucleotide
  misc_feature (80)..(94): n includes a, c, g, or t, or contains no nucleotide
  misc_feature (258)..(258): n includes a, c, g, or t, or contains no nucleotide
  misc_feature (260)..(297): n includes a, c, g, or t, or contains no nucleotide
cgggaatttcctacagtgcccttggntaaattaggcnnnnnnnnnnnnnnnnnnnnnnnnnnnnnaagaagatttgaaannnnnnnnnnnnnnnttgaattggatcacctcacagtttcaggagatgtgacatttggaaaaaatgtttcattaaagggaacggttatcatcattgcaaatcatggtgacagaattgatatcccacctggagcagtattagagaacaagattgtgtctggaaaccttcgcatcttggancnnnnnnnnnnnnnnnnnnnnnnnnnnnnnnnnnnnnnngctagtttcttacaatgaaatgttctctaggattctaaaataggcaggtactttactatgttactgtaccctgcagtgttgatttttaaaatagagttttctgcagtatgcttttagtctaagaaaagcacagatggagcaatactttccttctttgaagagaatcccaaaagttagttcatcttaaagtgcaatattgtttaatcttaaaactgggcaact

SEQ ID NO: 4694 - DNA, 543 bp, Homo sapiens
  misc_feature (120)..(120): n includes a, c, g, or t, or contains no nucleotide
  misc_feature (190)..(256): n includes a, c, g, or t, or contains no nucleotide
  misc_feature (279)..(314): n includes a, c, g, or t, or contains no nucleotide
  misc_feature (506)..(506): n includes a, c, g, or t, or contains no nucleotide
agcagagcaactctccaacacactgaaaaaaattgcagccagtgagaaatttacaaacttcaatcttttctacatggattttgccttccatgaaatcatacaggagtggcagaagagagncggacagccctggcagctcatcgagcccgtggatggattccaccccaacgaggtggctttgctgttgttnnnnnnnnnnnnnnnnnnnnnnnnnnnnnnnnnnnnnnnnnnnnnnnnnnnnnnnnnnnnnnnnnnncaacccccagattaaacaggtgnnnnnnnnnnnnnnnnnnnnnnnnnnnnnnnnnnnncatgcacccctggggagcacagggaggcagaggcttgggtaaactcattccacaaaccctatgggggctgccacgtcacaggcccaaaggactcttcttcagcagcatctttgcaaaatgtctttctctcaatgaagagcatatctggacgactgtgcaatgctgtgtgctcccgggatcagtaacccttcngctgttcctgaaataacctttcataaagtgctttggg

SEQ ID NO: 4695 - DNA, 337 bp, Homo sapiens
ccttggtcttggaaactgaagggagaaggtctggcccccagggtggggctctcctttccctcccccagccccgccgtcagcactggccctctgtgaggttcgatacttgaacgccccctgccctgtgccttggacctgggcaaagctaggaggaggaaacagcacaactcacagtttgagctggggggtggtcttggcaaggctcctgtctgtacccctccctaaccttctcaaaagaggtgcacagcctctcgggtgacttggaaactcctggacaaattccattctaacttattttgacatgtatacaaaccaactgtttagagattccacttgt

SEQ ID NO: 4696 - DNA, 521 bp, Homo sapiens
tggacttcagttctgctagcatgtaaagagtggtggactttaaaaccgtaagaggtatcattacaagtcacctggaacagactcaaagaacaggttctttgggcaacagacaaagaagaatcaagttctgtgctgtcccgtgagtgtgtctgagtaccattcactggagttgctgcttaggtctgggacgtgtgtgtgactcttaacaattgctgtctgaaaatgagagagaagacttcggaagcacattgtgttcataatgtactccacaatggccagtccaattgctatctatttttttatccagaggcttaattaaatgatgtggtaaaatgatgtttgagcattaagacaatgtaattctttatttctgggtggaaagatataccggattaaatttatctgtttaaaaaaatgacaaaagttatcaccaaaaccccctttcccatcttgcactgtttgttttggattgggtttgggggaaagagatgtttttcttagttgtctactttgtttgaaca

SEQ ID NO: 4697 - DNA, 497 bp, Homo sapiens
  misc_feature (48)..(62): n includes a, c, g, or t, or contains no nucleotide
  misc_feature (111)..(111): n includes a, c, g, or t, or contains no nucleotide
  misc_feature (165)..(179): n includes a, c, g, or t, or contains no nucleotide
  misc_feature (375)..(375): n includes a, c, g, or t, or contains no nucleotide
  misc_feature (382)..(382): n includes a, c, g, or t, or contains no nucleotide
  misc_feature (386)..(387): n includes a, c, g, or t, or contains no nucleotide
  misc_feature (389)..(424): n includes a, c, g, or t, or contains no nucleotide
gaccctgttacagacataccctatgccactgctcgagccttcaagatnnnnnnnnnnnnnnncaagaagtacattactgcccatggactgccgcccactgcctcagccctnggccccggcccgccacctcctgagcccctccctggctctgggccccgagccttnnnnnnnnnnnnnnncattaaatgaagagatgtctagtcctcagaaacttctttcctgccctgattggggctcttgctgttccgtttcttctccctgcttctcccctttgtcatctctgatctttgcctaatctgtttctttttccttttcccctagttcttacaggtttcgttgtgttttttaatctaataaaatagaaagatccctttnaaaaaanaaannannnnnnnnnnnnnnnnnnnnnnnnnnnnnnnnnnnncaggaggagacaagagttgtgcgcgatggtgagtcctgttacaagtcgaggacgccgcgaatttagtagaggt

SEQ ID NO: 4698 - DNA, 565 bp, Homo sapiens
ctctggggcctagaagtcttctcaagctgacttcctacctccccctccatctctagataagtgtcatatatttgttgagggcaaaagactatggactggaaggcagaaagtgggatcctggccccactctgcctttcctattgagcaaccagctctgggctcagtttcctcacctggagggttggacccactcacctccactctagccccgaaccctcctgccccaggcttccaggccccatcaggcctgccctgagttggccttgtccactccttgaggcagatcctggcactacctcacagctccctggggacggccactccctggctgagggccctcccctcccctctgcctgtccggaacgggaggctgaaatggaaaagctgccttggccctgcttggctgagtcacaaggggcagtgggctcttgggtgctgttccaccctgaccctggctcacccctcttcctaggcctgggggcaggcagttcctaccatgtacccctctcaggctgcctgcctgacaaggtcagcatcatttgctctcctgaatttatgaggttta

SEQ ID NO: 4699 - DNA, 486 bp, Homo sapiens
  misc_feature (71)..(71): n includes a, c, g, or t, or contains no nucleotide
  misc_feature (137)..(137): n includes a, c, g, or t, or contains no nucleotide
  misc_feature (181)..(181): n includes a, c, g, or t, or contains no nucleotide
  misc_feature (185)..(185): n includes a, c, g, or t, or contains no nucleotide
  misc_feature (191)..(191): n includes a, c, g, or t, or contains no nucleotide
  misc_feature (196)..(196): n includes a, c, g, or t, or contains no nucleotide
  misc_feature (245)..(245): n includes a, c, g, or t, or contains no nucleotide
  misc_feature (284)..(284): n includes a, c, g, or t, or contains no nucleotide
  misc_feature (369)..(369): n includes a, c, g, or t, or contains no nucleotide
  misc_feature (375)..(375): n includes a, c, g, or t, or contains no nucleotide
  misc_feature (390)..(404): n includes a, c, g, or t, or contains no nucleotide
  misc_feature (414)..(457): n includes a, c, g, or t, or contains no nucleotide
gtctgtcccactctgctaagcctggttttcttgagcagagggatggaacagagggtgagagaggcagtggncgtctccacctcagctcctgctccctctgcatcagagcccttcctttcttgggggatgggccttgnccctcttctcttttcccttcctgtacctttgactaacgctcagncttnccgggncctgncatgcagtagacagaagaggaagaaagaacagatgttcacagctgaatnctcagtgaacagaatagcagtccctggatggcagtctgncctaaagattcctttccctgccttctcccatacattccaaaaggaagttcaacagtaagcagcacctccaagactgtctcctttnggccantatcataagatggannnnnnnnnnnnnnngcctcctagnnnnnnnnnnnnnnnnnnnnnnnnnnnnnnnnnnnnnnnnnnnncaggtgggccaattattcaattttcaaga

SEQ ID NO: 4700 - DNA, 313 bp, Homo sapiens
  misc_feature (188)..(225): n includes a, c, g, or t, or contains no nucleotide
ggatagtcaaacctgccagatatcaaacctgaggaaggcagaagtgaatttggagaactagggtagagagaggttgctataaaacgagcatttggagggcccacggcttcactcaggacctgctgggcttgtgtaccccaggagcccttttaagtatcttttgtacgcttttcaccccacccccaagnnnnnnnnnnnnnnnnnnnnnnnnnnnnnnnnnnnnnnggccaagatatgcttgacagaaagggtgattttgaggctcagttaatatttcaaaattgtaaccgtagcaaaactgcattggtattta

SEQ ID NO: 4701 - DNA, 199 bp, Homo sapiens
  misc_feature (172)..(173): n includes a, c, g, or t, or contains no nucleotide
ccgcagtgaagtaccggccatcgacctagcccgggttctagatttggggcccatcactcggagaggtgcacagtctcccggtgtcatgaatggaacccctagcactgcagggttcctggtggcctggcctatggtcctcctgactgtcctcctggcttggctgttctgaganntccgctgagcatctggccttgaagtt

SEQ ID NO: 4702 - DNA, 440 bp, Homo sapiens
  misc_feature (115)..(115): n includes a, c, g, or t, or contains no nucleotide
aagcccagggccagggcactatctccgctgtgactccactcagcccctcttggcgggcctcacccccagccccaagtcctatgagaacctctggttccaggccagccccttgggnaccctggtaaccccagccccaagccaggaggacgactgtgtctttgggccactgctcaacttccccctcctgcaggggatccgggtccatgggatggaggcgctggggagcttctagggcttcctggggttcccttcttgggcctgcctcttaaaggcctgagctagctggagaagaggggagggtccataagcccatgactaaaaactaccccagcccaggctctcaccatctccagtcaccagcatctccctctcctcccaatctccataggctgggcctcccaggcgatctgcatactttaaggaccagatcatgctccatc

SEQ ID NO: 4703 - DNA, 450 bp, Homo sapiens
  misc_feature (69)..(89): n includes a, c, g, or t, or contains no nucleotide
tacttacctgcctgaagaaattctgcctttgacaataaatcctataccagctttttgtttgtttatgtnnnnnnnnnnnnnnnnnnnnngctcttcaaacttgtttgatataaaatatgttgtcttttgtttaagcatttattttcaaacactaaggagctttttgacatctgttaaacgtctttttgtttttttgttaagtcttttacattttaatagtttttgaagacaatctaggttaagcaagagcaaagtgccattgtttgcctttaattggggggtgggaagggaaagagggtacttgccacatagtttcctttttaactgcactttctttatataatcgtttgcattttgttacttgctaccctgagtactttcaggaagactgacttaaatattcggggtgagtaagtagttgggtataagatctgaacttttcatctgcag

SEQ ID NO: 4704 - DNA, 473 bp, Homo sapiens
  misc_feature (37)..(37): n includes a, c, g, or t, or contains no nucleotide
  misc_feature (58)..(123): n includes a, c, g, or t, or contains no nucleotide
  misc_feature (243)..(258): n includes a, c, g, or t, or contains no nucleotide
  misc_feature (331)..(347): n includes a, c, g, or t, or contains no nucleotide
cgtacgtgatggtggtcatgtcagatccgtcgatccnttctgcggccactctgatcannnnnnnnnnnnnnnnnnnnnnnnnnnnnnnnnnnnnnnnnnnnnnnnnnnnnnnnnnnnnnnnnntctccttatgcgttgaatattgccaaatgctctttctgaaaatgctgaattgccttttttgtttgcatcctttatttttaatattcataatgtcgtgtgcttaaaagtgggctttgaagnnnnnnnnnnnnnnnnctttcatctttctccccgcttccccagtctttaaacattggacgctatttactcagctacccagtagagcttnnnnnnnnnnnnnnnnngaagttggtatggtgtaacactaaagtaggtggttcgtgtgtgttctcattacctggttatgatagatatgcacatcaaagcctttaccagtatcttcctgtattccgtatcagattgcaaagacg

SEQ ID NO: 4705 - DNA, 421 bp, Homo sapiens
  misc_feature (34)..(34): n includes a, c, g, or t, or contains no nucleotide
  misc_feature (41)..(41): n includes a, c, g, or t, or contains no nucleotide
  misc_feature (52)..(52): n includes a, c, g, or t, or contains no nucleotide
  misc_feature (93)..(93): n includes a, c, g, or t, or contains no nucleotide
  misc_feature (280)..(296): n includes a, c, g, or t, or contains no nucleotide
  misc_feature (377)..(377): n includes a, c, g, or t, or contains no nucleotide
tctaaaggtgttctgcagatccatggaaagcttncctgggnaaacgtatgcntagcagagcttctccccgtgaatcatatttttaagatcccnactcttagctggtaaatgaatttgaatcgacatagtagccccataagcatcagccctgtagagtgaggagccatctctagcgggcccttcattcctctccatgctgcaatcactgtcctgggcttatggtgctatggactaggggtcctttgtgaaagagcaagatggagcaatggagagaagaccnnnnnnnnnnnnnnnnnactccagaaatgtgcatgcagatcagctgttgccttcaagatccagataaactttcctgtcatgtgttagaactttattantattaatattgttaaacttctgtgctgttcctgtgaatctccaa

SEQ ID NO: 4706 - DNA, 462 bp, Homo sapiens
  misc_feature (308)..(346): n includes a, c, g, or t, or contains no nucleotide
aaactttggcactggggcacttggcagcgcggggagcccgtcggtaattttaatattttattatatatatatatctatatttttgtccaaaccaaccgcacatgcagatggggctcccgcccgtggtgttatttaaagaagaaacgtctatgtgtacagatgaatgataaactctctgcttctccctctgcccctctccaggcgccggcgggcgggccggtttcgaagttgatgcaatcggtttaaacatggctgaacgcgtgtgtacacgggactgacgcaacccacgtgtaactgtcagccgggcnnnnnnnnnnnnnnnnnnnnnnnnnnnnnnnnnnnnnnnctgttgatgttttgttttgttttgttttttggtctttttttgtattataaaaaataatctatttctatgagaaaagaggcgtctgtatattttgggaatcttttccgtttcaagca

SEQ ID NO: 4707 - DNA, 516 bp, Homo sapiens
  misc_feature (26)..(26): n includes a, c, g, or t, or contains no nucleotide
  misc_feature (71)..(119): n includes a, c, g, or t, or contains no nucleotide
  misc_feature (214)..(214): n includes a, c, g, or t, or contains no nucleotide
  misc_feature (248)..(262): n includes a, c, g, or t, or contains no nucleotide
agatcctcgattactggggacccaanttccggcccattgacgtggcgcctcacccctgctgaagtgcgccnnnnnnnnnnnnnnnnnnnnnnnnnnnnnnnnnnnnnnnnnnnnnnnnngcgcctgtagctgcctggatgagcacacctggctcatcacacttgcaggcctgttccctaaggggccccagccaaggagctgagcgaggctgtcnggcttgggggagatctgacagcccagacctttcnnnnnnnnnnnnnnnagaaacaaagtctggacccactccatgctctgccctcagacctggccaggtgatgctctgggggcagcatctccccaccgagagaagcgggctcctaatgaggtgggaaagccacggcaggcagcgagcagcccaggccagctttctgcatggatggtcagtctcttgccctcaaacactacagcaaacaagctacccctgccagtcctagacaacttgggtacatctggggacctagcagttaggcttgactt

SEQ ID NO: 4708 - DNA, 295 bp, Homo sapiens
  misc_feature (46)..(46): n includes a, c, g, or t, or contains no nucleotide
  misc_feature (125)..(125): n includes a, c, g, or t, or contains no nucleotide
  misc_feature (132)..(132): n includes a, c, g, or t, or contains no nucleotide
  misc_feature (225)..(242): n includes a, c, g, or t, or contains no nucleotide
  misc_feature (245)..(245): n includes a, c, g, or t, or contains no nucleotide
ggctttgtctctagccgggccatgctttccttttcttccttctttntcttccctccttcccttctctccttccctctttccccacctcttccttccgctcctttacctaccaccttccctctttntacattntcatctactcattgtctcagtgctggtggagttgacatttgacagtgtgggaggcctcgtaccagccaggatcccaagcgtcccgtcccttgnnnnnnnnnnnnnnnnnnttngtcctgcccccgacagcccagcctagcccacttgtcatccataaagcaag

SEQ ID NO: 4709 - DNA, 375 bp, Homo sapiens
  misc_feature (26)..(26): n includes a, c, g, or t, or contains no nucleotide
  misc_feature (35)..(36): n includes a, c, g, or t, or contains no nucleotide
  misc_feature (47)..(72): n includes a, c, g, or t, or contains no nucleotide
  misc_feature (75)..(76): n includes a, c, g, or t, or contains no nucleotide
  misc_feature (83)..(85): n includes a, c, g, or t, or contains no nucleotide
  misc_feature (93)..(93): n includes a, c, g, or t, or contains no nucleotide
  misc_feature (144)..(144): n includes a, c, g, or t, or contains no nucleotide
aaagcagattggagctctgcagtaanccacagatnntcataggaaannnnnnnnnnnnnnnnnnnnnnnnnngtnncacaggnnncccaattnggagaaatcatatgaaaagcatagttggtcttggtgtcatatggatcaganggcacaagtgcagaggctgtggtcatgcggaacactctgttatttaagatggctatccagataatcctgaacactgtgtatttattttatttagactaccagcaaagattaaagcatgaaatgtaaaacatctgataaaacttacagccccctacaccaagagtgtatctgtgaaagagctcctacactttgaaaacttaagaatcccttatcatgaagtttgcctgttct

SEQ ID NO: 4710 - DNA, 342 bp, Homo sapiens
  misc_feature (232)..(232): n includes a, c, g, or t, or contains no nucleotide
  misc_feature (244)..(244): n includes a, c, g, or t, or contains no nucleotide
gtcagccaggcctgccaggtcttcacgttgaggattcaactggccaatcacaggacaggtgtcctggcctttcttcctgaggtctctaggggaggggcatgggtaagggtgtttcctcagcaccctcctggggtggggattatgtctgctgtcatgtctgggtctttagggtaggacaggctgtggtatgagaggcaggagtctccacaaggcttcatgtggccccttatanggcaggccctgncctctgggaaggtcccttcatgctggaggcacacagctttaaggaagtaggttgaagtaggactccttcgtcctctcactggctttggctccctcaat

SEQ ID NO: 4711 - DNA, 294 bp, Homo sapiens
gtcagacaaaatgcacactttatagtttcaagattttcagtaaataaaatctgtccattcctacctggacatgtcccattaaaaagtggaagattttaaataatttctttacagatgttttatttaaacaggtagcacaatctactaatgttgtgtgatttgtgttatactggttgtaattaatttttttaattcatgaactagcggaaaatttattaaattaactattaactacattcaccttgtaaattactgtataaaacttgttgacaatgcactgactttagaaagatg

SEQ ID NO: 4712 - DNA, 458 bp, Homo sapiens
  misc_feature (41)..(41): n includes a, c, g, or t, or contains no nucleotide
  misc_feature (81)..(82): n includes a, c, g, or t, or contains no nucleotide
  misc_feature (91)..(91): n includes a, c, g, or t, or contains no nucleotide
  misc_feature (97)..(97): n includes a, c, g, or t, or contains no nucleotide
  misc_feature (116)..(116): n includes a, c, g, or t, or contains no nucleotide
  misc_feature (236)..(236): n includes a, c, g, or t, or contains no nucleotide
  misc_feature (313)..(314): n includes a, c, g, or t, or contains no nucleotide
  misc_feature (329)..(329): n includes a, c, g, or t, or contains no nucleotide
  misc_feature (334)..(335): n includes a, c, g, or t, or contains no nucleotide
  misc_feature (403)..(433): n includes a, c, g, or t, or contains no nucleotide
tgtgctttctactgtgagtccctatcccaagatcctggggnaaaggagagaccatggtgtgaatgtagagatgccacctcnncctctctcntgaggncaggcctgtggatgaaggnaggagggtcagggctggccttcctctgtgcatcactctgctaggttgggggcccccgacccaccatacctacgcctagggagcccgtcctccagtattccgtctgtagcaggagctaggnctgctgcctcagctccaagacaagaatgaacctggctgtgtcagtcattttgtcttttccttttttttttttttttnngccacattggcagangatgnnacctaagggtcccacccctcaccccacccccacctcttctgtatgtttgaattctttcagtagctgtnnnnnnnnnnnnnnnnnnnnnnnnnnnnnnngtactttgctccattgttaattgag

SEQ ID NO: 4713 - DNA, 296 bp, Homo sapiens
  misc_feature (45)..(45): n includes a, c, g, or t, or contains no nucleotide
  misc_feature (117)..(117): n includes a, c, g, or t, or contains no nucleotide
  misc_feature (240)..(240): n includes a, c, g, or t, or contains no nucleotide
tggtgttcttgctaactttgcccttcactgttgcttaattgtgancagccaaaagctatatgttatggcttattgtgtgaaggtaactaagaagtggtgttccatgacttcagagtnacatccatgcggagtccattatttgagtttgacatttaataactttgctggaaaatctgtaaaaaagaaaaacaagtttgctagtgactaagccccgcatatgtgagtgaaagtacttcaggnacgctgcctcctggtaacagctatgcagggagggaggacccacactgctacacttc

SEQ ID NO: 4714 - DNA, 545 bp, Homo sapiens
  misc_feature (75)..(75): n includes a, c, g, or t, or contains no nucleotide
  misc_feature (80)..(108): n includes a, c, g, or t, or contains no nucleotide
  misc_feature (214)..(214): n includes a, c, g, or t, or contains no nucleotide
  misc_feature (272)..(272): n includes a, c, g, or t, or contains no nucleotide
  misc_feature (330)..(330): n includes a, c, g, or t, or contains no nucleotide
  misc_feature (340)..(340): n includes a, c, g, or t, or contains no nucleotide
  misc_feature (386)..(386): n includes a, c, g, or t, or contains no nucleotide
gcgaacccagtgacccagggacacgtggggtgtgctgctgctgctccccagcccaccagtgcctggccagcctgnccccnnnnnnnnnnnnnnnnnnnnnnnnnnnnnccggcggcttggggaaagccaaattgccaaaactcaagtcacctcagtaccatccaggaggctgggtattgtcctgcctctgccttttctgtctcagcgggcagtngcccagagcccacacccccccaagagccctcgatggacagcctcacccaccccacctngggcccagccaggagccccgcctggccatcagtatttattgcctccgtccgtgccgtnccctgggccnactggcctggcgcctgttcccccaggctctcagtgccaccaccccncggcaggccttccctgacccagccaggaacaaacaagggaccaagtgcacacattgctgagagccgtctcctgtgcctcccccgccccatccccggtcttcgtgttgtgtctgccaggctcaggcagaggcgcctgtccctgcttcttttctgaccggg

SEQ ID NO: 4715 - DNA, 445 bp, Homo sapiens
  misc_feature (147)..(147): n includes a, c, g, or t, or contains no nucleotide
  misc_feature (224)..(224): n includes a, c, g, or t, or contains no nucleotide
tcttcctctgagcaataccgccgggcaccgcaccagcaccagccccagccccagctccctccggccgcagaaccagcatcgggtgttcactgtcgagtctcgagtgatttgaaaatgtgccttacgctgccacgctgggggcagctngcctccgcctccgcccacgcaccagcagccgcctccatgccctaggttgggcccctgggggatctgagggcctgtgncccccagggcaagttcccagatcctatgtctgtctgtccaccacgagatgggaggaggagaaaaagcggtacgatgccttcctgacctcaccggcctccccaagggtgccggcactctgggtggactcacggctgctgggccccacgtcaaaggtcaagtgagacgtaggtcaagtcctacgtcggggcccagacatcctggggtcctggtctgtcagaca

SEQ ID NO: 4716 - DNA, 478 bp, Homo sapiens
  misc_feature (46)..(46): n includes a, c, g, or t, or contains no nucleotide
  misc_feature (74)..(74): n includes a, c, g, or t, or contains no nucleotide
  misc_feature (153)..(153): n includes a, c, g, or t, or contains no nucleotide
  misc_feature (306)..(306): n includes a, c, g, or t, or contains no nucleotide
  misc_feature (408)..(432): n includes a, c, g, or t, or contains no nucleotide
tgcctgcccagagtccttcaggggcacccctctgccttggtgtgcngtccagggctctcacccaggtgccgcancctctggggtcttctgtccagctcccttgccccatgtgctgtcactgactctccttgggactcgcctgcctgctcaganccctgcagggcttggtcagctgcctgttcagtgtcaacacttccctgcacatcttaaaactgggctttattttcgctgaaggaactgtgttgggacccttgacatctgtcaggtttgcacatgctgtttttttttctcagcccacgtgttctnccccacgtggggtagcagcaggacagacagtgaatcacagagtctgccctgagcagaggctgctgtccctgggactcctagccatggtcagactgtacaaannnnnnnnnnnnnnnnnnnnnnnnnatccatttttatactgaaaatgttactgaaagtcacttttatgagc

SEQ ID NO: 4717 - DNA, 422 bp, Homo sapiens
  misc_feature (107)..(107): n includes a, c, g, or t, or contains no nucleotide
  misc_feature (190)..(233): n includes a, c, g, or t, or contains no nucleotide
gaaccccttcaatacctggataggtctcacggacagtgatggctcttggaaatgggtggatggcacagactataggcacaactacaagaactgggctgtcactcagnccagataattggcacgggcacgagctgggtggaagtgaagactgtgttgaagtccagccggatggccgctggaacgatgactnnnnnnnnnnnnnnnnnnnnnnnnnnnnnnnnnnnnnnnnnnnngccaccggcgaggtggcctgaccccagcacacctctggctaacccataccccacacctgcccagctctggcttctctgttgaggattttgaggaaaggaagaaacactgagacaggggtatggggaagagctgagcaaagagagaaaggaggtagtttaagagtccctgaccctggaggactgagatcc

SEQ ID NO: 4718 - DNA, 377 bp, Homo sapiens
  misc_feature (57)..(73): n includes a, c, g, or t, or contains no nucleotide
  misc_feature (75)..(75): n includes a, c, g, or t, or contains no nucleotide
gactgtctcagaagacttgatttttccgtccctttttctccacactccactgacaannnnnnnnnnnnnnnnncnacttgtgggcttcaggtgttttcaagcacaacccaccacaacaagcaagtgcattttcagtcgttgtgcttttttgttttgtgctaacgtcttactaatttaaagatgctgtcggcaccatgtttatttatttccagtggtcatgctcagccttgctgctctgcgtggcgcaggtgccatgcctgctccctgtctgtgtcccagccacgcagggccatccactgtgacgtcggccgaccaggctggacaccctctgccgagtaatgacgtgtgtggctgggaccttctttattctgtgttaa

SEQ ID NO: 4719 - DNA, 193 bp, Homo sapiens
gcagtccttgatggagatgcagagtcgtcatggggcgagaacaagtgactctgaccagcaggcttaccttgttcaaagaggagctgaggacagggactggcggcaacagcggaatattccgattcattcctgccccaagtgtggagaggttctgcctgacatagacacgttacagattcacgtgatggattgc

SEQ ID NO: 4720 - DNA, 262 bp, Homo sapiens
attcaggtttactcacgtcatccagcagagaatggaaagtcaaatttcctgaattgctatgtgtctgggtttcatccatccgacattgaagttgacttactgaagaatggagagagaattgaaaaagtggagcattcagacttgtctttcagcaaggactggtctttctatctcttgtattatactgaattcacccccactgaaaaagatgagtatgcctgccgtgtgaaccacgtgactttgtcacagcccaagatagtta

SEQ ID NO: 4721 - DNA, 421 bp, Homo sapiens
  misc_feature (79)..(79): n includes a, c, g, or t, or contains no nucleotide
  misc_feature (104)..(127): n includes a, c, g, or t, or contains no nucleotide
  misc_feature (169)..(169): n includes a, c, g, or t, or contains no nucleotide
  misc_feature (175)..(175): n includes a, c, g, or t, or contains no nucleotide
  misc_feature (197)..(254): n includes a, c, g, or t, or contains no nucleotide
gctacggcatcatggggctgtacgtgtccatcgtgctggtcatcggcaagttcgtgcgcggattcttcagcgagatctngcactccattatgttcgaggagctnnnnnnnnnnnnnnnnnnnnnnnngctctgccaggacatcttcctggtgcgggagactcgggagcnggagcntggaggaggagttgtacgccannnnnnnnnnnnnnnnnnnnnnnnnnnnnnnnnnnnnnnnnnnnnnnnnnnnnnnnnngtaggagctgctgctggcgcccgagagggaaggagccggcctgctgggcagcgtggccacaaggggcggcactcctcaggccgggggagccactgccccgtccaaggccgccagctgtgatgcatcctcccggcctgcctgagccctgatgctgctgtcagagaagg

SEQ ID NO: 4722 - DNA, 553 bp, Homo sapiens
  misc_feature (37)..(38): n includes a, c, g, or t, or contains no nucleotide
  misc_feature (41)..(41): n includes a, c, g, or t, or contains no nucleotide
  misc_feature (43)..(43): n includes a, c, g, or t, or contains no nucleotide
  misc_feature (49)..(50): n includes a, c, g, or t, or contains no nucleotide
  misc_feature (54)..(54): n includes a, c, g, or t, or contains no nucleotide
  misc_feature (357)..(358): n includes a, c, g, or t, or contains no nucleotide
  misc_feature (360)..(376): n includes a, c, g, or t, or contains no nucleotide
  misc_feature (379)..(379): n includes a, c, g, or t, or contains no nucleotide
  misc_feature (397)..(397): n includes a, c, g, or t, or contains no nucleotide
  misc_feature (401)..(401): n includes a, c, g, or t, or contains no nucleotide
  misc_feature (403)..(403): n includes a, c, g, or t, or contains no nucleotide
  misc_feature (409)..(409): n includes a, c, g, or t, or contains no nucleotide
  misc_feature (418)..(418): n includes a, c, g, or t, or contains no nucleotide
  misc_feature (420)..(420): n includes a, c, g, or t, or contains no nucleotide
  misc_feature (432)..(479): n includes a, c, g, or t, or contains no nucleotide
  misc_feature (516)..(517): n includes a, c, g, or t, or contains no nucleotide
  misc_feature (523)..(523): n includes a, c, g, or t, or contains no nucleotide
ttcctgacgggcatgactgtggccggcgtggttctgnnggncncactcnncagncggaaatgaccagacactgaccatccactctaccctcccacccccttctctgctccaccacatcctccgtccagccgccattgccaccaggagaaccactacatgcagcccatgcccacctgcccatcacagggttgggcccagatctggtcccttgcagctagttttctagaatttatcacacttctgtgagacccccacacctcagttcccttggcctcagaattcacaaaatttccacaaaatctgtccaaaggaggctggcaggtatggaagggtttgtggctgggggcaggagggccnnannnnnnnnnnnnnnnnnttnaccccttagcctccctgnaaantntttttntgccagggngnttgaaagttttnnnnnnnnnnnnnnnnnnnnnnnnnnnnnnnnnnnnnnnnnnnnnnnntttgatgtttgtggcctcagaattgatcattttcccnncccccnccccacacttgttccagctctttgaaatag

SEQ ID NO: 4723 - DNA, 442 bp, Homo sapiens
  misc_feature (86)..(107): n includes a, c, g, or t, or contains no nucleotide
  misc_feature (180)..(196): n includes a, c, g, or t, or contains no nucleotide
tccagccctacagagactgagcggtgcatcgagtccctgattgctgtcttccagaagtatgctggaaaggatggttataactacannnnnnnnnnnnnnnnnnnnnnaagcttcatgaatacagaactagctgccttcacaaagaaccagaaggaccctggtgtccttgaccgcatgatnnnnnnnnnnnnnnnnnacagtgatggtcagctagatttctcagaatttcttaatctgattggtggcctagctatggcttgccatgactccttcctcaaggctgtcccttcccagaagcggacctgaggaccccttggccctggccttcaaacccaccccctttccttccagcctttctgtcatcatctccacagcccacccatcccctgagcacactaaccacctcatgcaggccccacctgccaatagtaataaagcaatg

SEQ ID NO: 4724 - DNA, 307 bp, Homo sapiens
  misc_feature (94)..(94): n includes a, c, g, or t, or contains no nucleotide
  misc_feature (255)..(255): n includes a, c, g, or t, or contains no nucleotide
cctggcgatggtctcagcagcccagccgggggatcctatgagacgggagaccgggatgacggacggggggacttcgggcccacactgggcctgntgcgcccagccccagagcctgaggctgagggctcagctgtgaagaggatgcggcttgatacctggacattaaagtgacgattcccactcccctcctctcagcctccctgatgaagagttgacaatctcaccgcccgcccttccctgccccgggctcctccngctcgacccccacttcctttcttgtgcttcgtgtcctgttgacggttacatt

SEQ ID NO: 4725 - DNA, 499 bp, Homo sapiens
  misc_feature (34)..(34): n includes a, c, g, or t, or contains no nucleotide
  misc_feature (47)..(47): n includes a, c, g, or t, or contains no nucleotide
  misc_feature (118)..(119): n includes a, c, g, or t, or contains no nucleotide
  misc_feature (144)..(146): n includes a, c, g, or t, or contains no nucleotide
  misc_feature (148)..(162): n includes a, c, g, or t, or contains no nucleotide
  misc_feature (202)..(222): n includes a, c, g, or t, or contains no nucleotide
  misc_feature (403)..(404): n includes a, c, g, or t, or contains no nucleotide
  misc_feature (455)..(469): n includes a, c, g, or t, or contains no nucleotide
aaagcaaaaagcaggccacaaccttaaccaacanccaaagaaacatnccaagcaataaagtggaagactaaccaagatttggacattggaatgtttactgttattctttaagaaacannctacaaaaagaaaatgtcaacaaannntnnnnnnnnnnnnnnnagaacctgggaattcctgcacggaagacaagagagtagcnnnnnnnnnnnnnnnnnnnnntaggtttctattttttttcctggtttttactgttttggtaatatatatattgaaacaagaaatattaataccacatggggagaaccccaaccaaagaaatctgaaatatatagtaaatgcttttttttccgtttttgttcattttggatgctggtgctaaacctccaagtgtcatgatttnnaaaaaaaaaaaaaatttatgtccttcttatttatttctaggatgaggggannnnnnnnnnnnnnntttcttatgtgactctctttgaaaatgtgc

SEQ ID NO: 4726 - DNA, 540 bp, Homo sapiens
  misc_feature (281)..(281): n includes a, c, g, or t, or contains no nucleotide
  misc_feature (364)..(365): n includes a, c, g, or t, or contains no nucleotide
cagtgaccttagctacatagcagactttcccaaatgtattgattacaaataaacagttgttacttagcaagacctgaaaatatgtctgcaggtttctccttgaagcaaatgtgtgggatcattgcatttccagaaatctgcctccttcaccctccgttgacagtatatgtcatgcctcactttcttctagctgagctttaaatcattagagcttaaattgtcagatcgttcattgcctttccagggttatttagtaaagtttgttgaaaacaaaaacgccnttttcttggttcttttttcagttattttgaaggtccagcatcctgattaaatgtctgacacattaatgaatgaccagcagcanntttcagctcttaaaaagacacttatattttgattttacatgctggttacctgttccattgttgtcaaatgcccactctccatcagatgtgttcctccattttcttatccacaaagtactcctcacttttcaatttgtcatgttactaaatggtgttacattaaagccctgtgtta

SEQ ID NO: 4727 - DNA, 526 bp, Homo sapiens
  misc_feature (27)..(27): n includes a, c, g, or t, or contains no nucleotide
  misc_feature (167)..(182): n includes a, c, g, or t, or contains no nucleotide
  misc_feature (184)..(184): n includes a, c, g, or t, or contains no nucleotide
  misc_feature (414)..(429): n includes a, c, g, or t, or contains no nucleotide
tgggcaaatctaagccttggccagggncgaagtttaggcccctgtcttgttcatgtagccgaggggcaggcgggggacctctacacctctgctgtgggcacggggctgctgagggtctgtggaactccagcagctctgcactgggtagagctgggcctagagctcannnnnnnnnnnnnnnntncctggcctgagtgggtagacgcaggcggcagaggtgctggaccacatctccgccaagtcactgcccagcagccttctccgtcctgtccccagcccacgtgctccttgggtgtcagcttcctgtgcctctgtgggagagggcagctgccttgtgttatgtctggggccacagttgctgcaaagtcctggatctgccactcaaccccgggagtggtgttcccagtgtggctnnnnnnnnnnnnnnnngattgtgatcccagctggcccctatgttgtgttctggactgaggcctttgctgtgaactgcagtgtttcatacgaaccatctttcctagtgcatgag

SEQ ID NO: 4728 - DNA, 513 bp, Homo sapiens
  misc_feature (32)..(32): n includes a, c, g, or t, or contains no nucleotide
  misc_feature (41)..(41): n includes a, c, g, or t, or contains no nucleotide
  misc_feature (47)..(48): n includes a, c, g, or t, or contains no nucleotide
  misc_feature (59)..(59): n includes a, c, g, or t, or contains no nucleotide
  misc_feature (62)..(62): n includes a, c, g, or t, or contains no nucleotide
  misc_feature (413)..(413): n includes a, c, g, or t, or contains no nucleotide
  misc_feature (424)..(424): n includes a, c, g, or t, or contains no nucleotide
ccgtcgccgccaagatgatgtgcggggcgccntccgccacncagccnnggccaccgccnagnacccagcacatcgccgaccaggtgaggtcccagcttgaagagaaagaaaacaagaagttccctgtgtttaaggccgtgtcattcaagagccaggtggtcgcggggacaaactacttcatcaaggtgcacgtcggcgacgaggacttcgtacacctgcgagtgttccaatctctccctcatgaaaacaagcccttgaccttatctaactaccagaccaacaaagccaagcatgatgagctgacctatttctgatcctgactttggacaaggcccttcagccagaagactgacaaagtcatcctccgtctaccagagcgtgcacttgtgatcctaaaataagcttcatctccnggctgtgcccnttggggtggaaggggcaggattctgcagctgcttttgcatttctcttcctaaatttcattgtgttgatttctttccttcccaataggtg

SEQ ID NO: 4729 - DNA, 444 bp, Homo sapiens
  misc_feature (89)..(132): n includes a, c, g, or t, or contains no nucleotide
tgctgtgtctcctgggtctgcccacccgtggccaagcaggaactccaggtgcagggcgggcctccaggtgcagggcgggccagaagccnnnnnnnnnnnnnnnnnnnnnnnnnnnnnnnnnnnnnnnnnnnnggctcttgcgtggtgagagtaggggtccccccaggagccatgctggacccatgagcctcgctggggcctcctccccaggcagccaatgggccccagacaagcctttggtggggaacagaacctccgcatcgtgtagttttgtgacataaggagacctcctacttgagctgtctgtaccccagaatcaaacacagaacctcagaaccagatttaggacctcagaatcctgcactcaaggtggcaggacccaatttctgttttatatgttcatgaactttaaacctggaaacatgtccttactaggtgttttat

SEQ ID NO: 4730 - DNA, 541 bp, Homo sapiens
ttaatgggcacaaaatgggcccttgcctctaaatagcactttttggggttcaagaagtaatcagtatgcaaagcaatcttttatacaataattgaagtgttccctttttcataattactctacttcccagtaaccctaaggaagttgctaacttaaaaaactgcatcccacgttctgttaatttagtaaataaacaagtcaaagacttgtggaaaataggaagtgaacccatattttaaattctcataagtagcattgatgtaataaacaggtttttagtttgttcttcagattgatagggagttttaaagaaattttagtagttactaaaattatgttactgtatttttcagaaatcaaactgcttatgaaaagtactaatagaacttgttaacctttctaaccttcacgattaactgtgaaatgtacgtcatttgtgcaagaccgtttgtccacttcattttgtataatcacagttgtgttcctgacactcaataaacagtcactggaaagagtgccagtcagcagtcatgcacgctga

SEQ ID NO: 4731 - DNA, 590 bp, Homo sapiens
cccataacagctcagagacctgtggcctccccactctggtccagacctatgtgctccagggggacccaagagcagtttccacccagccccaatcccagtctggcaccagcgatcaggtcctttatgggcagctgctgggcagccccacaagcccagggccagggcactatctccgctgtgactccactcagcccctcttggcgggcctcacccccagccccaagtcctatgagaacctctggttccaggccagccccttggggaccctggtaaccccagccccaagccaggaggacgactgtgtctttgggccactgctcaacttccccctcctgcaggggatccgggtccatgggatggaggcgctggggagcttctagggcttcctggggttcccttcttgggcctgcctcttaaaggcctgagctagctggagaagaggggagggtccataagcccatgactaaaaactaccccagcccaggctctcaccatctccagtcaccagcatctccctctcctcccaatctccataggctgggcctcccaggcgatctgcatactttaaggaccagatcatgctccatcca

SEQ ID NO: 4732 - DNA, 463 bp, Homo sapiens
gtggtctttccatgtggagactgatagaaaataattttgtcccaagtcttatttgctgactttttctgtcatgagtgagattgttgaacaaactgaatatatgggctatagcaagtagctttacagtacagatcttacaattaagttttgcttttgttaaagtgtgtaccattttttctgtttggagtaagacaaaaattgttttgacataggttccctagggtacacttgctctagcatactttaaaggccactgttgcaaagtctacattttatgctgaatctgcattctgtcaggcacccatagaaagacctcagtacatgctttgcactctcctttgctccctttttccaatttcttattgcatatcattttgttgtaatacagaaagcagcatttttaaatgtccgtgttaagaattggcccgctggtaccaactcacctctattttgtcagttcata

SEQ ID NO: 4733 - DNA, 452 bp, Homo sapiens
  misc_feature (26)..(26): n includes a, c, g, or t, or contains no nucleotide
  misc_feature (29)..(29): n includes a, c, g, or t, or contains no nucleotide
  misc_feature (46)..(48): n includes a, c, g, or t, or contains no nucleotide
  misc_feature (172)..(189): n includes a, c, g, or t, or contains no nucleotide
  misc_feature (280)..(280): n includes a, c, g, or t, or contains no nucleotide
  misc_feature (294)..(321): n includes a, c, g, or t, or contains no nucleotide
agtgtgtggcggtgacaccgtcaccnagncatgcgccacgccgtgnnncccaccagcagtgccaccgccaccacaccccagatcccacccaccttgcagtggcctttccttgtcatcagagtagagaatgcacaggtgttggtgagggcgtgtggctgagcactacatgtcnnnnnnnnnnnnnnnnnntatcccaattctccctgcagcctgaagaacggatccttgtctccaatgtcagcacaaaggaggctttttctgtgctttgacattctagcanttcagggatgagannnnnnnnnnnnnnnnnnnnnnnnnnnnagtatttctctgaggcccacacaaagctggacacccccaggctctactccatcccattggagtctcttctttttttgatagcgggagggaggaagtacgactaatgttggagcctgaaactatggaaatgc

SEQ ID NO: 4734 - DNA, 131 bp, Homo sapiens
  misc_feature (39)..(39): n includes a, c, g, or t, or contains no nucleotide
gagaagttccattcaaagtgccaatgatagagtcaacanggaaggttaatgttggaaacacaatcaggtgtggattggtgctactttgaacaaaaggtccccctgtggtcttttgttcaacattgtacaat

SEQ ID NO: 4735 - DNA, 358 bp, Homo sapiens
  misc_feature (99)..(158): n includes a, c, g, or t, or contains no nucleotide
  misc_feature (219)..(219): n includes a, c, g, or t, or contains no nucleotide
ccaggagatctccaagcgaactcagcctcctcccaagctccctgtgggtcctagccacaagctctccaacaattactattgcactcgcgatggccgccnnnnnnnnnnnnnnnnnnnnnnnnnnnnnnnnnnnnnnnnnnnnnnnnnnnnnnnnnnnngccagcagagagctctgctgtagctgccactgagaagaaggcggtgactccagctcctccnataaagaggtgggagctgtcctcggaccagccttacctgtgacactgcaccctcacggccacccgactactttgcctccttggatttcctccagggagaatgtgacctaatttatgacaaatacgtagagctcaggtat

SEQ ID NO: 4736 - DNA, 282 bp, Homo sapiens
  misc_feature (243)..(257): n includes a, c, g, or t, or contains no nucleotide
ccattctttgtaaacagttggatggattatgataaagaagatgctaccaatgaaatagaaaaccaacgagatgagaagactgtgatcctcatgtactcagaggcacttccctcctaagtcaaagaccatcctcactgactatgtgccaacgcctcgtttcaggcttgtgactcaacaaagggcttttccattgatagaagcagtttgggatttgtagttgcgacttcttcgatagttacctgnnnnnnnnnnnnnnncaactgacttgtcattaaaacctgg

SEQ ID NO: 4737 - DNA, 394 bp, Homo sapiens
  misc_feature (225)..(247): n includes a, c, g, or t, or contains no nucleotide
agagctgagcgagttcaccacagtggtggggaacaccatgtgcaccttggacttctatgaagggcaaggccgtctggatggggctctctgctcctacacggagaaggacaagcaggcgtatctggaggcagcctatgcagccggcgtccgcaatatcgagatggagtcctcggtgtttgccgccatgtgcagcgcctgcggcctccaagcggccgtggtgtgtgnnnnnnnnnnnnnnnnnnnnnnnggggaccagatcagcagccctcgcaatgtgctcagcgagtaccagcagaggccgcagcggctggtgagctacttcatcaagaagaaactgagcaaggcctgagcgctgccctgcacctccgcagacctgctgtgatgacttgccatt

SEQ ID NO: 4738 - DNA, 481 bp, Homo sapiens
  misc_feature (230)..(245): n includes a, c, g, or t, or contains no nucleotide
  misc_feature (355)..(372): n includes a, c, g, or t, or contains no nucleotide
  misc_feature (395)..(456): n includes a, c, g, or t, or contains no nucleotide
ctcctctgcatgcacttaactttggcattggtggtgacggcacacagcatgtactgtggcggctggagaatggggagctggaacacatccggcccaagattgtggtggtctgggtgggcaccaacaaccacggacacacagcagagcaggtgactggtggcatcaaggccattgtgcaactggtgaatgagcgacagccccaggcccgggttgtggtgctgggcctgctnnnnnnnnnnnnnnnncccaacccacttcgggagaagaaccgacaggtgaacgagctggtacgggcggcactggctggccaccctcgggcccacttcctagatgccgaccctggctttgtgcactnnnnnnnnnnnnnnnnnnatcatgacatgtatgattacctnnnnnnnnnnnnnnnnnnnnnnnnnnnnnnnnnnnnnnnnnnnnnnnnnnnnnnnnnnnnnntgctggcccaagaccagggccaagg

SEQ ID NO: 4739 - DNA, 133 bp, Homo sapiens
atcaatcgtgcatccttagtgaacttctgttgtcctcaagcatggtctttctacttgtaaactatggtgctcagttttgcctctgttagaaattcacactgttgatgtaatgatgtggaactcctctaaaaat

SEQ ID NO: 4740 - DNA, 589 bp, Homo sapiens
ggaaaggctcagtctcaggagcatggggataaaggagaaggcatgaaattgtctagcagagcaggggcagggtgataaattgttgataaattccactggacttgagcttggcagctgaactattggagggtgggagagcccagccattaccatggagacaagaagggttttccaccctggaatcaagatgtcagactggctggctgcagtgacgtgcacctgtactcaggaggctgaggggaggatcactggagcccaggagtttgaggctgcagcgagctatgatcgcgccactacactccagcctgagcaacagagtgagaccctgtctcttaaagaaaaaaaaagtcagactgctgggactggccaggtttctgcccacattggacccacatgaggacatgatggagcgcacctgccccctggtggacagtcctgggagaacctcaggcttccttggcatcacagggcagagccgggaagcgatgaatttggagactctgtggggccttggttcccttgtgtgtgtgtgttgatcccaagacaatgaaagtttgcactgtatgctggacggcattcctgcttatca

SEQ ID NO: 4741 - DNA, 454 bp, Homo sapiens
  misc_feature (118)..(132): n includes a, c, g, or t, or contains no nucleotide
  misc_feature (134)..(134): n includes a, c, g, or t, or contains no nucleotide
  misc_feature (263)..(282): n includes a, c, g, or t, or contains no nucleotide
  misc_feature (284)..(284): n includes a, c, g, or t, or contains no nucleotide
  misc_feature (290)..(324): n includes a, c, g, or t, or contains no nucleotide
  misc_feature (326)..(326): n includes a, c, g, or t, or contains no nucleotide
cacatgattacaattgccagtagagttgttgtttggggtacaagatgagaagaaagaaaaacctacagcctttctacattctgacatgctaacagtggtttaagtttctaaagtgttnnnnnnnnnnnnnnngncaaggggagggagcagaagcacttatgtttacggatattttaaactctgttagagagcagcctttgaaaatccccaatttggttctgctttttgacctctctctaccttttcagggtaatctttgtggnnnnnnnnnnnnnnnnnnnnangctttnnnnnnnnnnnnnnnnnnnnnnnnnnnnnnnnnnngnccctgagcgatcttctatgcagttctgccatgcgtcctgttggtctctctgtgttctttgttacttgggtgcaatagcaacttccctaccccgtgcattccatctttcatgttgtgtaaagttcttca

SEQ ID NO: 4742 - DNA, 444 bp, Homo sapiens
  misc_feature (131)..(132): n includes a, c, g, or t, or contains no nucleotide
  misc_feature (256)..(256): n includes a, c, g, or t, or contains no nucleotide
  misc_feature (284)..(284): n includes a, c, g, or t, or contains no nucleotide
  misc_feature (289)..(311): n includes a, c, g, or t, or contains no nucleotide
  misc_feature (342)..(342): n includes a, c, g, or t, or contains no nucleotide
tcatgtccagacagcggggaccaggggaaaacccagccccttctgtaatcccccttcatttcctaccttccttcctcctctgtttagcaaaggagggcagctcacttggatgtccttacaacgcccctggnnccccaggttgagcaataagaaaccagaaccttgcggcccagtggcccgggccagttcaggccgcctccccctcctctgcctggggccattgagcccagcctccagggcccgggtgcgtttgcangccagtggccactgtccgggctgtgatnggcannnnnnnnnnnnnnnnnnnnnnnaccacacagctgggcttcccaccaggctttnccgcgggggtctcagggagcttctccccagcgctgctcggagtctgcaggaactggccttgttctccttagcccgtcactccatacagtattaggtgaggat

SEQ ID NO: 4743 - DNA, 464 bp, Homo sapiens
  misc_feature (78)..(148): n includes a, c, g, or t, or contains no nucleotide
  misc_feature (252)..(256): n includes a, c, g, or t, or contains no nucleotide
  misc_feature (258)..(261): n includes a, c, g, or t, or contains no nucleotide
  misc_feature (263)..(263): n includes a, c, g, or t, or contains no nucleotide
  misc_feature (267)..(273): n includes a, c, g, or t, or contains no nucleotide
  misc_feature (275)..(275): n includes a, c, g, or t, or contains no nucleotide
  misc_feature (277)..(282): n includes a, c, g, or t, or contains no nucleotide
  misc_feature (284)..(285): n includes a, c, g, or t, or contains no nucleotide
  misc_feature (287)..(289): n includes a, c, g, or t, or contains no nucleotide
  misc_feature (291)..(293): n includes a, c, g, or t, or contains no nucleotide
  misc_feature (295)..(296): n includes a, c, g, or t, or contains no nucleotide
  misc_feature (308)..(308): n includes a, c, g, or t, or contains no nucleotide
  misc_feature (310)..(310): n includes a, c, g, or t, or contains no nucleotide
aactctgcaagcaggtgaggtccagagatatatccagagaggagtggaagggctcggagacctacagccccaatactnnnnnnnnnnnnnnnnnnnnnnnnnnnnnnnnnnnnnnnnnnnnnnnnnnnnnnnnnnnnnnnnnnnnnnncaactcaggggcacagctctcccactgcaagtccctgggccactttgagaacctgcagaaatacaaggcggccaagaaccccagccccaccacccgacctgtgnnnnncnnnngngcgnnnnnnncncnnnnnncnntnnnannncnntgttcacctccngnggccgcccaccctcccagcccaacacccaggacaaaacacccagcaaggtgacggctcgaccctcccagcccccactacctcggcgctcaacccgcctcaaaacctgatagagggacctccctgtccctggcctgcctgggtccagatctgcta

SEQ ID NO: 4744 - DNA, 285 bp, Homo sapiens
  misc_feature (37)..(37): n includes a, c, g, or t, or contains no nucleotide
  misc_feature (46)..(46): n includes a, c, g, or t, or contains no nucleotide
gaccttcagttggagctgaactcggaatccgaagttnggaaccccngggggccgagggctgccggtccgggctccgctcagcaccctcaacggcgagatcagcgccctgacggccgaggcggcatgcgttcctgcggacgatcgcatcttgtgtcgctgaagcgcctcccccagggaccggcggaccccagccatccagggggcaagaggaattacgtgctctgtgggtctcccccaacgcgcctcgccggatctgagggagaacaagaccgatcggcggccact

SEQ ID NO: 4745 - DNA, 575 bp, Homo sapiens
  misc_feature (115)..(115): n includes a, c, g, or t, or contains no nucleotide
  misc_feature (158)..(158): n includes a, c, g, or t, or contains no nucleotide
  misc_feature (259)..(313): n includes a, c, g, or t, or contains no nucleotide
  misc_feature (315)..(316): n includes a, c, g, or t, or contains no nucleotide
  misc_feature (373)..(395): n includes a, c, g, or t, or contains no nucleotide
cgaccggaagctgagcaagaacgaggtgctccgcctagccatgaagtacatcggcttcctggtgcggctgctgcgcgaccaagccgcagctctggccgcaggccccacccctccngggcctcgcaaacggccggtgcaccgggtcccagacgacggcncccgccggggatccggacgcagggccgaggcggcagcgcgctcgcagcccgcgcccccggccgaccccgacggcagccccggtggagcggcccggcccatnnnnnnnnnnnnnnnnnnnnnnnnnnnnnnnnnnnnnnnnnnnnnnnnnnnnnnncnnctctgagccggagggcaccagggactcggcccagggccgtcaaggaaagggcagtgnnnnnnnnnnnnnnnnnnnnnnncgaactcccccgaagaaggaccagtgaagacgtcaggggcaaggtctcgggggtccggaagggtgatcatcgacccccaagggacccgcagacccttaaaaaaatcacccacaaccctctggaagtggccttgcccggtccccttcccaggggcgaggtcggcaaagcaacatggcagag

SEQ ID NO: 4746 - DNA, 498 bp, Homo sapiens
  misc_feature (180)..(194): n includes a, c, g, or t, or contains no nucleotide
  misc_feature (256)..(273): n includes a, c, g, or t, or contains no nucleotide
cctatctggccgaggacgagctgcgcgccgcttgcgctcccggcccgctctgctggggggcgctggcggcgcagcttgcgctgctgggccttgggctgctgcacgcgttgctgctggtgctgctgctgtgccgcctgcggaggctgcgggcccgggcccgcgctcgcgccgcagcccggnnnnnnnnnnnnnnnccgctggtggccgagcgagccggaaccgacgagtcctgaggagagaaccggtgcgtcctgannnnnnnnnnnnnnnnnngcaacacgggcctgcaaactcgacaggaccctgcccgaggggccctcgcgccaacctggaccggtccccgcctcctccgctgcccaatctctcagacccaccccacctgcaggcccagaccacgtgggacagaactcctgcccaccctaccccgagggaggcgaacccgcacttccaggcttgggaggaccatggggcacaatgcggtccagaccctgctgcgtc

SEQ ID NO: 4747 - DNA, 129 bp, Homo sapiens
ctgcacacctactagtcaccagagactttagggggtgggattccactcgtgtgtttctattttttgaaaagcagacattttaaaaaatggtcacgtttggtgcttctcagatttctgaggaaattgctt

SEQ ID NO: 4748 - DNA, 547 bp, Homo sapiens
agtgttcacatcactaaactcatcgccaccacccactgctgcatcaaccctctcctgtatgcgtttcttgatgggacatttagcaaatacctctgccgctgtttccatctgcgtagtaacaccccacttcaacccagggggcagtctgcacaaggcacatcgagggaagaacctgaccattccaccgaagtgtaaactagcatccaccaaatgcaagaagaataaacatggattttcatctttctgcattatttcatgtaaattttctacacatttgtatacaaaatcggatacaggaagaaaagggagaggtgagctaacatttgctaagcactgaatttgtctcaggcaccgtgcaaggctctttacaaacgtgagctccttcgcctcctaccacttgtccatagtgtggataggactagtctcatttctctgagaagaaaactaaggcgcggaaatttgtctaagatcacttaactaggaagtggcagaactgattctccagccctggtagcatttgctcagagcctacgcttggtccagaaca

SEQ ID NO: 4749 - DNA, 527 bp, Homo sapiens
  misc_feature (29)..(44): n includes a, c, g, or t, or contains no nucleotide
  misc_feature (50)..(50): n includes a, c, g, or t, or contains no nucleotide
  misc_feature (54)..(58): n includes a, c, g, or t, or contains no nucleotide
  misc_feature (60)..(63): n includes a, c, g, or t, or contains no nucleotide
  misc_feature (65)..(153): n includes a, c, g, or t, or contains no nucleotide
  misc_feature (167)..(169): n includes a, c, g, or t, or contains no nucleotide
  misc_feature (172)..(173): n includes a, c, g, or t, or contains no nucleotide
  misc_feature (233)..(247): n includes a, c, g, or t, or contains no nucleotide
  misc_feature (258)..(279): n includes a, c, g, or t, or contains no nucleotide
  misc_feature (298)..(335): n includes a, c, g, or t, or contains no nucleotide
cagttaatgctagtctttcatgtgaaatnnnnnnnnnnnnnnnngccttntctnnnnntnnnntnnnnnnnnnnnnnnnnnnnnnnnnnnnnnnnnnnnnnnnnnnnnnnnnnnnnnnnnnnnnnnnnnnnnnnnnnnnnnnnnnnnnnnnnntaagggctaatctnnnacnnccttagctgtaagagtctggcttagaacagacctctctgtgcaataacttgtggccactnnnnnnnnnnnnnnnggcatttgtannnnnnnnnnnnnnnnnnnnnngggccaaaagagttaaagnnnnnnnnnnnnnnnnnnnnnnnnnnnnnnnnnnnnnncttccaaggctgagggggtcagtaggtgctctggagggactcggcaccacttgatattcaacagccacttgagccaaatataaaattgtatttacagctgatggactcaatttgagccttcaaacttgtagttatcctattatattgtaaactaatacattgtctagcattgatttggttcctgtgcatatg

SEQ ID NO: 4750 - DNA, 351 bp, Homo sapiens
  misc_feature (180)..(180): n includes a, c, g, or t, or contains no nucleotide
  misc_feature (199)..(199): n includes a, c, g, or t, or contains no nucleotide
  misc_feature (306)..(308): n includes a, c, g, or t, or contains no nucleotide
  misc_feature (322)..(323): n includes a, c, g, or t, or contains no nucleotide
ttggtttcggacgacccttgctctgaccggaagagaagtccctatcccacacctgcctgtcacgttccctcccctttccccagcgcactgttgagggcagcctctccagctctcttgtttatgcaaacgccgagcgcctgggaggctcggtaggaggagtcttccacggccccgccccgnccctgtcggtcccgccctnccccccgccgggctcctggggctgtggccgaaaggtttctgatctccgtgtgtgcatgtgactgtgctgggttggaatgtgaacaataaagaggaatgtccaagtgnnnaaaaaaaaaaaaannagggagtttgggtgcacaaggcctccgc

SEQ ID NO: 4751 - DNA, 451 bp, Homo sapiens
  misc_feature (33)..(33): n includes a, c, g, or t, or contains no nucleotide
  misc_feature (79)..(79): n includes a, c, g, or t, or contains no nucleotide
  misc_feature (86)..(86): n includes a, c, g, or t, or contains no nucleotide
  misc_feature (96)..(96): n includes a, c, g, or t, or contains no nucleotide
  misc_feature (101)..(101): n includes a, c, g, or t, or contains no nucleotide
  misc_feature (108)..(108): n includes a, c, g, or t, or contains no nucleotide
  misc_feature (119)..(119): n includes a, c, g, or t, or contains no nucleotide
  misc_feature (126)..(126): n includes a, c, g, or t, or contains no nucleotide
  misc_feature (137)..(138): n includes a, c, g, or t, or contains no nucleotide
  misc_feature (148)..(148): n includes a, c, g, or t, or contains no nucleotide
  misc_feature (172)..(172): n includes a, c, g, or t, or contains no nucleotide
  misc_feature (183)..(183): n includes a, c, g, or t, or contains no nucleotide
  misc_feature (189)..(189): n includes a, c, g, or t, or contains no nucleotide
  misc_feature (195)..(196): n includes a, c, g, or t, or contains no nucleotide
  misc_feature (201)..(201): n includes a, c, g, or t, or contains no nucleotide
  misc_feature (207)..(207): n includes a, c, g, or t, or contains no nucleotide
  misc_feature (219)..(219): n includes a, c, g, or t, or contains no nucleotide
  misc_feature (223)..(223): n includes a, c, g, or t, or contains no nucleotide
  misc_feature (228)..(228): n includes a, c, g, or t, or contains no nucleotide
  misc_feature (233)..(233): n includes a, c, g, or t, or contains no nucleotide
  misc_feature (236)..(236): n includes a, c, g, or t, or contains no nucleotide
  misc_feature (246)..(246): n includes a, c, g, or t, or contains no nucleotide
  misc_feature (248)..(248): n includes a, c, g, or t, or contains no nucleotide
  misc_feature (257)..(257): n includes a, c, g, or t, or contains no nucleotide
  misc_feature (270)..(270): n includes a, c, g, or t, or contains no nucleotide
  misc_feature (275)..(275): n includes a, c, g, or t, or contains no nucleotide
  misc_feature (283)..(284): n includes a, c, g, or t, or contains no nucleotide
  misc_feature (292)..(292): n includes a, c, g, or t, or contains no nucleotide
  misc_feature (297)..(297): n includes a, c, g, or t, or contains no nucleotide
  misc_feature (310)..(312): n includes a, c, g, or t, or contains no nucleotide
  misc_feature (314)..(338): n includes a, c, g, or t, or contains no nucleotide
ctccaccaaaggacaaactaagagaaacttggncgaaaggcaaagaggaaagtctagacagtgacttgtatgctgaacnccgctgncatgtgtatnaaagnacaaccntctgggaattncatcccnaaaaacatccnnaaagtttggnaagtgatcggggaaagggaacccnattggcaaccnaagtcngaagtnnatagnccacantgaaggatgggnaggnaaatntgccnggnccccagatgntncccagaatncaagaaaattgtnacagnaaaaattnnggcaggtngatgnatctgctgattannntnnnnnnnnnnnnnnnnnnnnnnnnnaactcccaggaagggtagaattttgaaaccttgattttctagagttctcatttattcaggatacctattcttactgtattaaaatttggatatgtgtttcattctgtctcaaa

SEQ ID NO: 4752 - DNA, 505 bp, Homo sapiens
  misc_feature (45)..(76): n includes a, c, g, or t, or contains no nucleotide
  misc_feature (148)..(194): n includes a, c, g, or t, or contains no nucleotide
  misc_feature (369)..(450): n includes a, c, g, or t, or contains no nucleotide
  misc_feature (471)..(475): n includes a, c, g, or t, or contains no nucleotide
tctcttcttcaagtcccccttgtggcggggactgtgaaccgaggnnnnnnnnnnnnnnnnnnnnnnnnnnnnnnnnatgactggtgtgccttctgtggcctggacacaaccagcacagagctgtcagtggtggagagtgtcttcaagnnnnnnnnnnnnnnnnnnnnnnnnnnnnnnnnnnnnnnnnnnnnnnnttccctcattgacagcctcacctgagtcaccttccaagttgttccatgggctcctggctctggactgtggccaaccttctccacattccgcccaatctgtaccggatgctggcagggaggtggcagagagctcactgggactgaggggctgggcacccaacccttttccacctgnnnnnnnnnnnnnnnnnnnnnnnnnnnnnnnnnnnnnnnnnnnnnnnnnnnnnnnnnnnnnnnnnnnnnnnnnnnnnnnnnntgagggttctgctgtcctgtnnnnngccaccccattaaagtgcagttccctccgg

SEQ ID NO: 4753 - DNA, 315 bp, Homo sapiens
  misc_feature (39)..(53): n includes a, c, g, or t, or contains no nucleotide
  misc_feature (55)..(55): n includes a, c, g, or t, or contains no nucleotide
  misc_feature (276)..(290): n includes a, c, g, or t, or contains no nucleotide
cttcatcaagccatgaaaggtgttggaactcgccataannnnnnnnnnnnnnntnatggtttcccgttctgaaattgacatgaatgatatcaaagcattctatcagaagatgtatggtatctccctttgccaagccatcctggatgaaaccaaaggagattatgagaaaatcctggtggctctttgtggaggaaactaaacattcccttgatggtctcaagctatgatcagaagactttaattatatattttcatcctataagcttaaataggaannnnnnnnnnnnnnnattacagtgtagctacctacatgct

SEQ ID NO: 4754 - DNA, 335 bp, Homo sapiens
  misc_feature (86)..(100): n includes a, c, g, or t, or contains no nucleotide
  misc_feature (262)..(262): n includes a, c, g, or t, or contains no nucleotide
  misc_feature (280)..(288): n includes a, c, g, or t, or contains no nucleotide
ctgtgttccagaggacctgatgccaaggggtaatgggcccagcagtgcctctggagcccaggccccaacacagccccatggcctcnnnnnnnnnnnnnnnaaaaaggtgatccaagcaggcccctttatctgtacatagtgactgagtggggggtgctggcaagtgtggcagctgcctctgggctgagcacagcttgacccctctagcccctgtaaatactggatcaatgaatgaataaaactctcctaagaatctcctganaaaaaaaaaaaaaaaaannnnnnnnncagaggacctgatgccaaggggtaatgggcccagcagtgcctctgga

SEQ ID NO: 4755 - DNA, 410 bp, Homo sapiens
  misc_feature (249)..(249): n includes a, c, g, or t, or contains no nucleotide
  misc_feature (294)..(329): n includes a, c, g, or t, or contains no nucleotide
atttgctgttgcttgctgaactgtgaagaactgcatgaactatatttaagctgctttctgtaccattgccaatcacctttttggagttggaagtgctattttcctatggacttttgcattatttcattgtgcatgcatccagtgattatacataagcaacatatgtaatctgcttatatatttttaaaaatccatccacacacatggtaaattaagtataaattcttttgcaaaattatagttcatgtncattgaaagtttaaattggtttcatttaaagatcaatatactagnnnnnnnnnnnnnnnnnnnnnnnnnnnnnnnnnnnnagattttttcactgtttactagtgaaatgagaaaagcaaagctatttataaaaggccttatgtcgtgtacatacattgtct

SEQ ID NO: 4756 - DNA, 542 bp, Homo sapiens
  misc_feature (44)..(44): n includes a, c, g, or t, or contains no nucleotide
  misc_feature (90)..(90): n includes a, c, g, or t, or contains no nucleotide
  misc_feature (97)..(97): n includes a, c, g, or t, or contains no nucleotide
  misc_feature (107)..(107): n includes a, c, g, or t, or contains no nucleotide
  misc_feature (112)..(112): n includes a, c, g, or t, or contains no nucleotide
  misc_feature (119)..(119): n includes a, c, g, or t, or contains no nucleotide
  misc_feature (130)..(130): n includes a, c, g, or t, or contains no nucleotide
  misc_feature (137)..(137): n includes a, c, g, or t, or contains no nucleotide
  misc_feature (148)..(149): n includes a, c, g, or t, or contains no nucleotide
  misc_feature (159)..(159): n includes a, c, g, or t, or contains no nucleotide
  misc_feature (183)..(183): n includes a, c, g, or t, or contains no nucleotide
  misc_feature (194)..(194): n includes a, c, g, or t, or contains no nucleotide
  misc_feature (200)..(200): n includes a, c, g, or t, or contains no nucleotide
  misc_feature (206)..(207): n includes a, c, g, or t, or contains no nucleotide
  misc_feature (212)..(212): n includes a, c, g, or t, or contains no nucleotide
  misc_feature (218)..(218): n includes a, c, g, or t, or contains no nucleotide
  misc_feature (230)..(230): n includes a, c, g, or t, or contains no nucleotide
  misc_feature (234)..(234): n includes a, c, g, or t, or contains no nucleotide
  misc_feature (239)..(239): n includes a, c, g, or t, or contains no nucleotide
  misc_feature (244)..(244): n includes a, c, g, or t, or contains no nucleotide
  misc_feature (247)..(247): n includes a, c, g, or t, or contains no nucleotide
  misc_feature (257)..(257): n includes a, c, g, or t, or contains no nucleotide
  misc_feature (259)..(259): n includes a, c, g, or t, or contains no nucleotide
  misc_feature (268)..(268): n includes a, c, g, or t, or contains no nucleotide
  misc_feature (281)..(281): n includes a, c, g, or t, or contains no nucleotide
  misc_feature (286)..(286): n includes a, c, g, or t, or contains no nucleotide
  misc_feature (294)..(295): n includes a, c, g, or t, or contains no nucleotide
  misc_feature (303)..(303): n includes a, c, g, or t, or contains no nucleotide
  misc_feature (308)..(308): n includes a, c, g, or t, or contains no nucleotide
  misc_feature (321)..(323): n includes a, c, g, or t, or contains no nucleotide
  misc_feature (325)..(349): n includes a, c, g, or t, or contains no nucleotide
gctctggcttcctccaccaaaggacaaactaagagaaacttggncgaaaggcaaagaggaaagtctagacagtgacttgtatgctgaacnccgctgncatgtgtatnaaagnacaaccntctgggaattncatcccnaaaaacatccnnaaagtttggnaagtgatcggggaaagggaacccnattggcaaccnaagtcngaagtnnatagnccacantgaaggatgggnaggnaaatntgccnggnccccagatgntncccagaatncaagaaaattgtnacagnaaaaattnnggcaggtngatgnatctgctgattannntnnnnnnnnnnnnnnnnnnnnnnnnnaactcccaggaagggtagaattttgaaaccttgattttctagagttctcatttattcaggatacctattcttactgtattaaaatttggatatgtgtttcattctgtctcaaaaatcacattttattctgagaaggttggttaaaagatggcagaaagaagatgaaaataaataagcctggtttcaaccctct

SEQ ID NO: 4757 - DNA, 470 bp, Homo sapiens
  misc_feature (27)..(108): n includes a, c, g, or t, or contains no nucleotide
  misc_feature (110)..(112): n includes a, c, g, or t, or contains no nucleotide
  misc_feature (114)..(115): n includes a, c, g, or t, or contains no nucleotide
  misc_feature (118)..(125): n includes a, c, g, or t, or contains no nucleotide
  misc_feature (140)..(170): n includes a, c, g, or t, or contains no nucleotide
  misc_feature (219)..(233): n includes a, c, g, or t, or contains no nucleotide
tcctttatccagttaagtacaaggccnnnnnnnnnnnnnnnnnnnnnnnnnnnnnnnnnnnnnnnnnnnnnnnnnnnnnnnnnnnnnnnnnnnnnnnnnnnnnnnnnnannngnnccnnnnnnnncttcatctctcgacnnnnnnnnnnnnnnnnnnnnnnnnnnnnnnnctaactccaacccaccatgttacaagacaatggatgaggatattgtgannnnnnnnnnnnnnnagatccgcttaaagattgtggggacccgtgtggacaagaatgacatttttgctattggctccctgatggacgattacttggggcttgtaagctgagcctggtggcctcctacccttggtcctactctaggaagtgtgattgtcacacttatcatgttgtccagaggtccagtctggctgctgttgtggaggcaaggaaggcaactcatcccagaaggcatctggtgcttcttgtagc

SEQ ID NO: 4758 - DNA, 532 bp, Homo sapiens
  misc_feature (39)..(39): n includes a, c, g, or t, or contains no nucleotide
  misc_feature (215)..(262): n includes a, c, g, or t, or contains no nucleotide
ccttcaatcaaggaatgatggggatgtgtacataccccnccccaccccttggcagggtgatgctgaggtgtggatttttaacagttcccagactttcccaggaggcttgggtttgggtgcccacagtgggagctggtgtgatatcataccttcgccggccgcctttccttcctgttctctgtgcccctactcccactctagagctgccccgtttnnnnnnnnnnnnnnnnnnnnnnnnnnnnnnnnnnnnnnnnnnnnnnnnatgcccctgccactcctgtgagcctgctgctggtgaggtcggtgctgacctctgtgttgctggataatgagtcatctatctctggaggagaagaaaggcaggtcctccacagccctgataaaatctccaagtctcccagtttcgggtccctctcctgggatgcagacccactgcctgcccagctggtacgatccacatgccctcttcttgggaataggggcatgggaaagtgactaaagatactgttctggctgctgtgttcactgtgag

SEQ ID NO: 4759 - DNA, 250 bp, Homo sapiens
  misc_feature (76)..(113): n includes a, c, g, or t, or contains no nucleotide
  misc_feature (177)..(177): n includes a, c, g, or t, or contains no nucleotide
aaatctactgtgagaagcatgcccgggagcgagtcacaccacctgagggttatgaagtggtcactgtgttccccannnnnnnnnnnnnnnnnnnnnnnnnnnnnnnnnnnnnnaggcctctgctgcagctttttctctcagtgttctggccctctcctctcttgaaagttctctgcntactttggttttccctctgcttgtaaaacattgagtcccctccctgccttggttaattgactcacaccagctg

SEQ ID NO: 4760 - DNA, 434 bp, Homo sapiens
  misc_feature (66)..(97): n includes a, c, g, or t, or contains no nucleotide
  misc_feature (104)..(104): n includes a, c, g, or t, or contains no nucleotide
  misc_feature (162)..(162): n includes a, c, g, or t, or contains no nucleotide
  misc_feature (361)..(377): n includes a, c, g, or t, or contains no nucleotide
aggcaggacagcatttgacttttatttaaaaggcggcactacttatgtaaatctgagctgtgggannnnnnnnnnnnnnnnnnnnnnnnnnnnnnnntcactgnaactcatggtcatgattttgtataatatagttcatactgtgtctgtgagtttcttcanttacaaatgggcatttagtatagttatattgactataacatgtaagtaaatagctttctactgaccctaagttatcaaggtggaaaaaaaacatgcaattcagtaattgaaaatgtggtgaaaagctgcagctgtcatcatcaaaacaactcataacatactttaaaatgttcaggtagcagtgagcattgttcatatnnnnnnnnnnnnnnnnngatctctttgctgaattaatgagttcttaacatgtggacccaactgcctgtgtgaga

SEQ ID NO: 4761 - DNA, 532 bp, Homo sapiens
  misc_feature (43)..(67): n includes a, c, g, or t, or contains no nucleotide
  misc_feature (129)..(143): n includes a, c, g, or t, or contains no nucleotide
cagcgagttctcctgggcatgaaaaagcgaggcttcggggccnnnnnnnnnnnnnnnnnnnnnnnnnaagtgcaagaaggagagaccatcgaggatggggctaggagggagctgcaggaggagagcggnnnnnnnnnnnnnnncctgcacaaggtgggccagatcgtgtttgagttcgtgggcgagcctgagctcatggacgtgcatgtcttctgcacagacagcatccaggggacccccgtggagagcgacgaaatgcgcccatgctggttccagctggatcagatccccttcaaggacatgtggcccgacgacagctactggtttccactcctgcttcagaagaagaaattccacgggtacttcaagttccagggtcaggacaccatcctggactacacactccgcgaggtggacacggtctagcgggagcccagggcagcccctgggcaggagacgtggctgctgaacagccgcaaaccatcttcacctgggggcattgagtggcgcagagccgggtttcatctggaat

SEQ ID NO: 4762 - DNA, 416 bp, Homo sapiens
  misc_feature (53)..(53): n includes a, c, g, or t, or contains no nucleotide
  misc_feature (84)..(84): n includes a, c, g, or t, or contains no nucleotide
agcccaagatagttaagtgggatcgagacatgtaagcagcatcatggaggttngaagatgccgcatttggattggatgaattcnaaattctgcttgcttgctttttaatattgatatgcttatacacttacactttatgcacaaaatgtagggttataataatgttaacatggacatgatcttctttataattctactttgagtgctgtctccatgtttgatgtatctgagcaggttgctccacaggtagctctaggagggctggcaacttagaggtggggagcagagaattctcttatccaacatcaacatcttggtcagatttgaactcttcaatctcttgcactcaaagcttgttaagatagttaagcgtgcataagttaacttccaatttacatactctgcttagaatttgg

SEQ ID NO: 4763 - DNA, 506 bp, Homo sapiens
  misc_feature (30)..(30): n includes a, c, g, or t, or contains no nucleotide
  misc_feature (36)..(36): n includes a, c, g, or t, or contains no nucleotide
  misc_feature (52)..(52): n includes a, c, g, or t, or contains no nucleotide
  misc_feature (73)..(73): n includes a, c, g, or t, or contains no nucleotide
  misc_feature (76)..(76): n includes a, c, g, or t, or contains no nucleotide
  misc_feature (80)..(82): n includes a, c, g, or t, or contains no nucleotide
  misc_feature (161)..(176): n includes a, c, g, or t, or contains no nucleotide
acacaaactgggtcttggatacacagttgntatttnaatgttttacgatctnagcctttccagtacaggcacnttnctgnnnaaacctttgtcctcacttgaggcattttgttgtcgggtttttgtgtttgtttttgtgggtatttgcctcattccacccnnnnnnnnnnnnnnnnacagacgtgattcaaaactctgttctaaggtgtttattgtagtggagtaatgggtttgcagtgataagtcatacttttccaccgaaagggagggcttgggaatccctgagattagctaaagttaagttgttggaagaattccttgattggaaattgtacctttgtgttttgttgctctgtttcctgaaaataactcggggatgctcctggtttgtccatctactgctttgattccttggatcccacccattctttcactttaagaaaaaacaaataattgttgcagaggtctctgtattttgcagctgcccttttgtaagaagcactttt

SEQ ID NO: 4764 - DNA, 310 bp, Homo sapiens
  misc_feature (200)..(217): n includes a, c, g, or t, or contains no nucleotide
ttgcccgcatcatgagcattgtggaccccaaccgcctgggggtagtgacattccaggccttcattgacttcatgtcccgcgagacagccgacacagatacagcagaccaagtcatggcttccttcaagatcctggctggggacaagaactacattaccatggacgagctgcgccgcgagctgccacccgaccaggctgannnnnnnnnnnnnnnnnnggccccctacaccggccccgactccgtgccaggtgctctggactacatgtccttctccacggcgctgtacggcgagagtgacctctaatccac

SEQ ID NO: 4765 - DNA, 477 bp, Homo sapiens
  misc_feature (117)..(117): n includes a, c, g, or t, or contains no nucleotide
agtacagcttgacagctcccggcaccatcccttccttcatctgacttattgaacttttacaaactaacagtcaccagcaccaaagaattaagtcaactaacctgccttgaattttanaccagcaatccatatggctttatctggtataaatcttctgcctttgatcatttctggaccgtaggaaaaaggaatagcaatcattaaaatcttgggccagagaacactatttttacataacagtttcttaacctaaagtcaaggccttggactcttccctgagggttgcctgagattccttcatgctttctattcaggactaagtcccttactgcaaatgtgttagctctaacatctcccacaagctagaggaacttgcgagtatattaacaaggacacatctgacatcctgtgtttggttagaatatacagcacattgtgataacataaagtggattcatcttgtatcattataggcag

SEQ ID NO: 4766 - DNA, 523 bp, Homo sapiens
  misc_feature (275)..(275): n includes a, c, g, or t, or contains no nucleotide
  misc_feature (317)..(338): n includes a, c, g, or t, or contains no nucleotide
  misc_feature (341)..(342): n includes a, c, g, or t, or contains no nucleotide
gcagtatgccacttcttaaaacagaacaaaacaaaaaaagaaaattgtgctcttttctaatccaaagggtatatttgcagcatgcttgactttaccaattctgatgacatctttacggacactattatcactaagaccttgttatggcgaagtctttagtctttttcatgtattttcctcatgattttttctctttatgtagtttgactatgccttacctttgtaaatatttttgcttgtgttgtcgcaaaggggataatctgggaaagacaccnaaatcatgggctcactttaaaaaaagaaagaataaaaaaacnnnnnnnnnnnnnnnnnnnnnnatnntacctctgtataaaattcttcagggagtgtcacctcaaatgcaatactttgggttggtttctttcctttaaaaaaatttgtataaaactggaagtgtgtgtgtgtgagcatgggtacccatttgataagagaaatgcatttgattgtgaagaagggagagttaaattctccattatgttcg

SEQ ID NO: 4767 - DNA, 532 bp, Homo sapiens
  misc_feature (32)..(32): n includes a, c, g, or t, or contains no nucleotide
  misc_feature (37)..(37): n includes a, c, g, or t, or contains no nucleotide
  misc_feature (46)..(46): n includes a, c, g, or t, or contains no nucleotide
  misc_feature (52)..(52): n includes a, c, g, or t, or contains no nucleotide
  misc_feature (54)..(54): n includes a, c, g, or t, or contains no nucleotide
  misc_feature (61)..(84): n includes a, c, g, or t, or contains no nucleotide
  misc_feature (87)..(88): n includes a, c, g, or t, or contains no nucleotide
  misc_feature (90)..(90): n includes a, c, g, or t, or contains no nucleotide
  misc_feature (93)..(94): n includes a, c, g, or t, or contains no nucleotide
  misc_feature (98)..(98): n includes a, c, g, or t, or contains no nucleotide
  misc_feature (107)..(107): n includes a, c, g, or t, or contains no nucleotide
  misc_feature (113)..(132): n includes a, c, g, or t, or contains no nucleotide
  misc_feature (134)..(138): n includes a, c, g, or t, or contains no nucleotide
  misc_feature (143)..(143): n includes a, c, g, or t, or contains no nucleotide
  misc_feature (181)..(181): n includes a, c, g, or t, or contains no nucleotide
cctcctgctctggtgcctgccgggggcctggnccctngtgggggtnggggancncttttgnnnnnnnnnnnnnnnnnnnnnnnnctnnanaanncccntggggcccnagagannnnnnnnnnnnnnnnnnnncnnnnnagctnagagggactggtgggggccctgatgcacgtgatgcagnaagagaagcagagccatccactcctccgacgaaggggaggaccaggctggcgatgaagatgaagatgatgaatgggatgactgagtggctgagttacttgctgccctgtgctcctccccgcaggacatggctccccctccacctgctctgtgcccaccctccactctcctcttccaggcccccaaccccccatttcttccccaccaacccctccaatgctgttatccctgcctggtcctcacactcacccaacaatcccaaggccctttttatacaaaaattctcagttctcttcactcaaggatttttaaagaaaaataaaagaattgtctttctgtctctctataaaaa

SEQ ID NO: 4768 - DNA, 452 bp, Homo sapiens
  misc_feature (28)..(28): n includes a, c, g, or t, or contains no nucleotide
  misc_feature (34)..(34): n includes a, c, g, or t, or contains no nucleotide
  misc_feature (38)..(38): n includes a, c, g, or t, or contains no nucleotide
  misc_feature (50)..(50): n includes a, c, g, or t, or contains no nucleotide
  misc_feature (56)..(57): n includes a, c, g, or t, or contains no nucleotide
  misc_feature (60)..(60): n includes a, c, g, or t, or contains no nucleotide
  misc_feature (78)..(78): n includes a, c, g, or t, or contains no nucleotide
  misc_feature (93)..(94): n includes a, c, g, or t, or contains no nucleotide
  misc_feature (105)..(308): n includes a, c, g, or t, or contains no nucleotide
  misc_feature (347)..(347): n includes a, c, g, or t, or contains no nucleotide
aatgaccttgtcgaaatccacctgtcanggacgncctnaggggtctgtanccgggnnctnggcctgtgcctatcaccntcttatgcacacctnncccaccccctnnnnnnnnnnnnnnnnnnnnnnnnnnnnnnnnnnnnnnnnnnnnnnnnnnnnnnnnnnnnnnnnnnnnnnnnnnnnnnnnnnnnnnnnnnnnnnnnnnnnnnnnnnnnnnnnnnnnnnnnnnnnnnnnnnnnnnnnnnnnnnnnnnnnnnnnnnnnnnnnnnnnnnnnnnnnnnnnnnnnnnnnnnnnnnnnnnnnnnnnnnnnaaaaaaaaaaaaaaaaaaaaaaaaaaaaaaaaaaaaaanaaaaatagctttcctgggtccaatagtcttggaggacaattttccttccgctttgccctccctccttcctttttgcttttcatagccccggtgtgcggtgcatac

SEQ ID NO: 4769 - DNA, 495 bp, Homo sapiens
  misc_feature (76)..(77): n includes a, c, g, or t, or contains no nucleotide
  misc_feature (286)..(337): n includes a, c, g, or t, or contains no nucleotide
atagggcttgctggtacctatgtgactaagaaagggacatgatgtaagggaaaaggcctcaaattcttgtgaatgnntggacattctcgttaatattcttttgggctaatagtgacatagtgtgcagaggtgtaccagggatcatgggggatttcctagcactagtatgcttctagttttagataactccctcctttattccctggccccttgtattttccttatcttcctctttcaagacccctacccattttgcctatccgtaggctggggcttgtgtctttgnnnnnnnnnnnnnnnnnnnnnnnnnnnnnnnnnnnnnnnnnnnnnnnnnnnncgtcctccctgcctctccgtcttgtaatgagttgtagtatttactcttaacataggatcatttggaacaggagttctgaggaggagagagtgagggttttgctattgactgacttgaacgatggcttctcctcaagctgtaggctccagagcttccta

SEQ ID NO: 4770 - DNA, 426 bp, Homo sapiens
tgcccctagccaaggagtgtgaatttatagatctaactttcataggcaaaacaaaagcttcgagctgttgcgtgtgtgagtctgttgtgtggatgtgcgtgtgtggtccccagccccagactggattggaaaagtgcatggtgggggcctcggggctgtccccacgctgtccctttgccacaagtctgtggggcaagaggctgcaatattccgtcctgggtgtctgggctgctaacctggcctgctcaggcttcccaccctgtgcggggcacacccccaggaagggaccctggacacggctcccacgtccaggcttaaggtggatgcacttcccgcacctccagtcttctgtgtagcagctttaacccacgtttgtctgtcacgtccagtcccgagacggctgagtgaccccaagaaaggcttccc

SEQ ID NO: 4771 - DNA, 402 bp, Homo sapiens
  misc_feature (35)..(35): n includes a, c, g, or t, or contains no nucleotide
  misc_feature (54)..(55): n includes a, c, g, or t, or contains no nucleotide
  misc_feature (58)..(153): n includes a, c, g, or t, or contains no nucleotide
  misc_feature (155)..(157): n includes a, c, g, or t, or contains no nucleotide
  misc_feature (159)..(159): n includes a, c, g, or t, or contains no nucleotide
  misc_feature (165)..(165): n includes a, c, g, or t, or contains no nucleotide
  misc_feature (189)..(189): n includes a, c, g, or t, or contains no nucleotide
  misc_feature (197)..(198): n includes a, c, g, or t, or contains no nucleotide
  misc_feature (200)..(204): n includes a, c, g, or t, or contains no nucleotide
  misc_feature (206)..(206): n includes a, c, g, or t, or contains no nucleotide
  misc_feature (209)..(209): n includes a, c, g, or t, or contains no nucleotide
  misc_feature (212)..(213): n includes a, c, g, or t, or contains no nucleotide
  misc_feature (216)..(217): n includes a, c, g, or t, or contains no nucleotide
  misc_feature (273)..(315): n includes a, c, g, or t, or contains no nucleotide
  misc_feature (357)..(357): n includes a, c, g, or t, or contains no nucleotide
attttacaaactggactggctcaggcagggccacnggctgggctccagctgccnnggnnnnnnnnnnnnnnnnnnnnnnnnnnnnnnnnnnnnnnnnnnnnnnnnnnnnnnnnnnnnnnnnnnnnnnnnnnnnnnnnnnnnnnnnnnnnnnnngnnngnttacanggcatcctcaccaggggccccgcntgctgctnncnnnnngntgncgnncanngctatgctcaaggacctggaaacccatgcttcgagacaacgtgactttaatgggannnnnnnnnnnnnnnnnnnnnnnnnnnnnnnnnnnnnnnnnnntggggccctctccagcccgtcctaccctgggctcacatgggncctgtgcccacccctcttgagtgtcttggggacagctctttccac

SEQ ID NO: 4772 - DNA, 458 bp, Homo sapiens
  misc_feature (91)..(91): n includes a, c, g, or t, or contains no nucleotide
  misc_feature (110)..(110): n includes a, c, g, or t, or contains no nucleotide
  misc_feature (131)..(132): n includes a, c, g, or t, or contains no nucleotide
  misc_feature (222)..(261): n includes a, c, g, or t, or contains no nucleotide
cctagaaccagagaggacaatgatcttgattcccaggtttcccaggagggtcttggcccggttctacagccccagcccaaatcctatttcnaagagcatctctgtgaccnaagatcactaaaccagatggnngatagtggaggagcgccggactgtggtggacagtgagggccggacagagactacagtaacccgacacgaagcagatagcagtcctagggnnnnnnnnnnnnnnnnnnnnnnnnnnnnnnnnnnnnnnnncttttccatcctggacttattcctgggacgttggttccggtcccggtagccttgttaaccctcagaggccttcaagtcctttccacctctcacccattgcccaccattaataagcttagcttctcttgccacctcaggggcttggatatgtggaatagtgaactggggccatgtcagtttgtcactcacccaaactg

SEQ ID NO: 4773 - DNA, 397 bp, Homo sapiens
  misc_feature (261)..(275): n includes a, c, g, or t, or contains no nucleotide
tttcctgaacctggtccagtgtattcagaacaagcccctgtatttcgctgaccggctgtacgactccataatgggcatggggactcaagataaggtcctgatcagaatcatggtctcccacaatgaagtggacatgttgaaaattaggtctgaattcaagagaaagtatagcaagtccctgtactactatatccagcaagacactaagggtgctgtacctgtgtggtggagatggctgaagtccgacacagcacgagcgtnnnnnnnnnnnnnnncccatgcttccagctaacaggtctagaaaacccgcttgtgactagcagtccctgtggctgttcctgtgaggatgacgttagcattacccccaacctcattttagttgcctaagcattgcctg

SEQ ID NO: 4774 - DNA, 606 bp, Homo sapiens
  misc_feature (392)..(394): n includes a, c, g, or t, or contains no nucleotide
  misc_feature (396)..(396): n includes a, c, g, or t, or contains no nucleotide
  misc_feature (398)..(399): n includes a, c, g, or t, or contains no nucleotide
  misc_feature (401)..(403): n includes a, c, g, or t, or contains no nucleotide
  misc_feature (405)..(405): n includes a, c, g, or t, or contains no nucleotide
  misc_feature (445)..(448): n includes a, c, g, or t, or contains no nucleotide
  misc_feature (553)..(553): n includes a, c, g, or t, or contains no nucleotide
tcttactggaatgtctaggcactgtacagttattatatatcttggttgttgtattgtaccagtgaaatgccaaatttgaaaggcctgtactgcaattttatatgtcagagattgcctgtggctctaatatgcacctcaagattttaaggagataatgtttttagagagaatttctgcttccactatagaatatatacataaatgtaaaatacttacaaaagtggaagtagtgtattttaaagtaattacacttctgaatttatttttcatattctatagttggtatgacttaaatgaattactggagtgggtagtgagtgtacttaaatgtttcaattctgttatattttttattaagtttttaaaaaattaaattggatattaaattgtannnanannannnantaattttaaactgaatgccctcaataagtaatactgaagnnnnttcttaaatgaagataaattatctccaatgaaaagcatgacatgtgtttcaatagaagaatcttaagttggctaaattcaaagtgcttgacatcaaaatgttctngagtgattagctactagattctgaatcatacatcacatctgactagagaccag

SEQ ID NO: 4775 - DNA, 433 bp, Homo sapiens
  misc_feature (87)..(125): n includes a, c, g, or t, or contains no nucleotide
  misc_feature (398)..(398): n includes a, c, g, or t, or contains no nucleotide
gaggagcctgctttgcccagcctggagggcgtcagtgaaaagcagtacaccatctacatcgcacctggaggcggggcgttcacgacnnnnnnnnnnnnnnnnnnnnnnnnnnnnnnnnnnnnnnnattctggaaggtgtcccggccactggagctgtgctatgctcccaccaaggatccaaagtgaccccaccaggggacagccagaggaaggggaccatggggtatccctgtgtcctggtctatcaccccagcttctttgtcccccagtacccccagcccagccagccaataagaggacacaaatgaggacacgtggcttttatacaaagtatctatatgagattcttctatattgtacagagtggggcaaaacacgcccccatctgctgccttttntattgccctgcaacgtcccatctatacgaggtgtt

SEQ ID NO: 4776 - DNA, 595 bp, Homo sapiens
aatattcattttactcagaatagcctgttttgtgtatattggtgtatattatataactctttgagcctttattggtaaattctggtatacattgaattcattataatttgggtgactagaacaacttgaagattgtagcaataagctggactagtgtcctaaaaatggctaactgatgaattagaagccatctgacagacggccactagtgacagtttcttttgtgttcctatggaaacattttatactgtacatgctatgctgaagacattcaaaacgtgatgttttgaatgtggataaaactgtgtaaaccacataattttgtacatccaaggatgaggtgtgacctttaagaaaaatgaaaacttttgtaaattattgatgattttgtaattcttatgactaaattttcttttaagcatttgtatattaaaatagcatactgtgtatgttttatatcaaatgccttcatgaatctttcatacatatatatatttgtaacatgtaaagtatgtgagtagtcttatgtaaagtatgtttttacattatgcaaataaaacccaatacttttgtccaatgtggttggtcaaatcaa

SEQ ID NO: 4777 - DNA, 442 bp, Homo sapiens
  misc_feature (87)..(87): n includes a, c, g, or t, or contains no nucleotide
taagaaggtgcctaccagtaacacagagggaggctggtcctgctctctcgctgagtacatccgccacaacgacatgcccatctacgnaagctgccgacaaagccctgaaaaccttccaggaggagttcatgccagtggagaccttctcagagttcctcgatgtggccggtcttttatcagaaatcaccgatccagagagcttcctgaaggacctgttgaactcagtcccctgaccaccacacagcagctgcggcggcgaagacgaagctggcttgccttccaccctctgttctccctccttgtgcattaagttccctccgcgggatgctgcattgttaccccgccctcccctctctcatttttcttggtgtggcttggggtttttaggcttcctgttttatctcgtgtgtgtggtgcaccagctatgaggttgtctgtaacc

SEQ ID NO: 4778 - DNA, 295 bp, Homo sapiens
  misc_feature (180)..(196): n includes a, c, g, or t, or contains no nucleotide
  misc_feature (241)..(261): n includes a, c, g, or t, or contains no nucleotide
tcccacaaaagacagacccagtgagtgaatcaggcaaagtgcttataatgtgtgttgtgtgagcgtggccttgggaggacatgcgtgtgtcagggatgagttgaggtgatatttttatgtgcagcgacccttggtgtttcccttcctcggtggctctggggtatgtgtgtgtgggtgtgnnnnnnnnnnnnnnnnngtgtgcttgaatgtgagtgtgtatgtcagtggtttctacttcccnnnnnnnnnnnnnnnnnnnnnagtggacatggtcacagtcctatgtacagagctt

SEQ ID NO: 4779 - DNA, 474 bp, Homo sapiens
  misc_feature (178)..(332): n includes a, c, g, or t, or contains no nucleotide
  misc_feature (337)..(337): n includes a, c, g, or t, or contains no nucleotide
tttagcacccttctgctgtatactgtactgagacattacagtttggaagtgttaactatttattccctgttaaaatttaacctactagacaatgatgtgagtacccaggatgatttcctggggcacagtgggtgaggagatggggacaggtgaatggaggagttaggggagaggaaannnnnnnnnnnnnnnnnnnnnnnnnnnnnnnnnnnnnnnnnnnnnnnnnnnnnnnnnnnnnnnnnnnnnnnnnnnnnnnnnnnnnnnnnnnnnnnnnnnnnnnnnnnnnnnnnnnnnnnnnnnnnnnnnnnnnnnnnnnnnnnnnnnnnnnnnnnaaaancctatcatcttacaaaaacaagacacccaagtccaggcccaaggagtaagtacaaatattcctgtttctgaaccattactgtaattggctcttaaggcttgaagtaaccttataggttactcataaggcatatacaa

SEQ ID NO: 4780 - DNA, 480 bp, Homo sapiens
  misc_feature (231)..(246): n includes a, c, g, or t, or contains no nucleotide
  misc_feature (356)..(361): n includes a, c, g, or t, or contains no nucleotide
  misc_feature (404)..(404): n includes a, c, g, or t, or contains no nucleotide
atgttaaagccacagagatagagctgaggagtcctgtgttcccccgcaaggagcaccccgggatcattttctaggttcatttctctggaacatttgctgtagcatctggtctcacggactctgaggaggaattggaaattggtctcttttgagtgcagagggaactgagacgccagcttaaattggctcttgcagagagttacagaaatagtttcgatgagctagtgacannnnnnnnnnnnnnnnagatcctcctggcggcagtagccttgacaagggccacctcttcacaggatgcagtctgtctgtgcaccaaactcttcaccaaatagaacacttgtgtctctctgtggaannnnnnttttcttgtgccttgcttgctttcatagccttccattttattngcatggctgccttgatgtaacataattctctgtccccaagatttagaaaattcctcttcgttcaccttggctcatg

SEQ ID NO: 4781 - DNA, 235 bp, Homo sapiens
gtacctccttgatgatgacccaagactgctcactctaagtgcctcttccaaggtgcctgtcaccttggccgctgtctaaaggtccattgctccctaagcaatagagggcccccagtaggggagctaggggcatctgctccagggaaaggaaccctgtgtccttgtggggctggagtcagagctggatctgttaaccgtttttctaatttcaaagtacagtgtaccggaggccagg

SEQ ID NO: 4782 - DNA, 565 bp, Homo sapiens
agtttgcctgcagtttcttgtgtagatttgaaaattgtataccaacgtgttttctgtagactctaagatacactgcactttgtttagaaaaaaaactgaagatgaaatatatattgtaaagaagggatattaagaatcttagataacttcttgaaaaagatggcttatgtcatcagcaaagtacctccatgttatgaggatataatgtgtgcttcattgaattagaaaattagtgaccattattcacaggtggacaaatgttgtcctgttaatttataggagttttttgggatgtggaggtagttgggtagaaaaattattagaacattcacttttgttaacagtatttctcttttattctgttatatagtggatgatatacacagtggcaaaacaaaagtacattgcttaaaatatatagtgaaaaatgtcactatatcttcccatttaacattgtttttgtatattgggtgtagatttctgacatcaaaacttggacccttggaaaacaaaagttttaattaaaaaaaatccttgtgacttacaatttgcacaatatttcttt

SEQ ID NO: 4783 - DNA, 451 bp, Homo sapiens
  misc_feature (45)..(60): n includes a, c, g, or t, or contains no nucleotide
  misc_feature (83)..(104): n includes a, c, g, or t, or contains no nucleotide
  misc_feature (246)..(263): n includes a, c, g, or t, or contains no nucleotide
  misc_feature (367)..(368): n includes a, c, g, or t, or contains no nucleotide
  misc_feature (372)..(372): n includes a, c, g, or t, or contains no nucleotide
  misc_feature (375)..(375): n includes a, c, g, or t, or contains no nucleotide
  misc_feature (379)..(381): n includes a, c, g, or t, or contains no nucleotide
  misc_feature (383)..(383): n includes a, c, g, or t, or contains no nucleotide
  misc_feature (385)..(385): n includes a, c, g, or t, or contains no nucleotide
  misc_feature (387)..(388): n includes a, c, g, or t, or contains no nucleotide
  misc_feature (390)..(390): n includes a, c, g, or t, or contains no nucleotide
  misc_feature (397)..(399): n includes a, c, g, or t, or contains no nucleotide
  misc_feature (403)..(404): n includes a, c, g, or t, or contains no nucleotide
  misc_feature (406)..(406): n includes a, c, g, or t, or contains no nucleotide
  misc_feature (409)..(409): n includes a, c, g, or t, or contains no nucleotide
  misc_feature (411)..(411): n includes a, c, g, or t, or contains no nucleotide
gattcttaaacgagctgcatgggtgaaggtgccatctgggttctnnnnnnnnnnnnnnnnccacggagcaatgcagagtcccnnnnnnnnnnnnnnnnnnnnnnggaagtatggggccctggtcatctgtgagacgtctgaacagaaaacaaaccttgaagacgttggccgccgccttgggcagcatgtggtgggcatggcccccctctctgttggctccctggacgatgagcctgggggagaggnnnnnnnnnnnnnnnnnncccagccgtatttgctggatccctccattaccttggggcagtatgtgcagcctcagggggtgtcggtagtagactttgtgcggtttgaatgtggagaaggtgannaggnagnagannntnantnngntccagannntttnngnccngnaggaatatttacttttagctctggacatcattacaaaaag

SEQ ID NO: 4784 - DNA, 235 bp, Homo sapiens
agacttacagggtgcgaacattccagataggtacaggggagaaactggtgaaggccctggttccagcctttctgggtagaaccatctcctcctatgccacctgtttgggcccctcctgggactttatcaccgtgccagacttcatggaggaactgtttaccagaatgttagatgtgacagcctcatggcctcctctaggtatggtggcatcttcccaggttctgggactaggatg

SEQ ID NO: 4785 - DNA, 422 bp, Homo sapiens
  misc_feature (70)..(70): n includes a, c, g, or t, or contains no nucleotide
  misc_feature (189)..(189): n includes a, c, g, or t, or contains no nucleotide
  misc_feature (219)..(219): n includes a, c, g, or t, or contains no nucleotide
  misc_feature (322)..(322): n includes a, c, g, or t, or contains no nucleotide
gtctgcaggtccagccggctggcaccctccatgtacccaggggagattccagccagacacccgccccccnggccctggctaagaagttgcttcctgttgccagcatgacctaccctcgcctctttgatgccatccgctgccacctccttttgctcctggaccctttagcctctctgcccttccactctntgaccaccgcccccgccctccccacccagntccgcttcttgttacttgggggaggaaagaaactcctgatcattggccaaagggacttacccctggagaggccaagtgccttctaggaagttaggaggttgangcacagcctgtgcagagagggtgggtcacccccccagatccaaggggaaactgcaggtcaagggctgataacggccatgcaggatgcttgatgctgcgtc

SEQ ID NO: 4786 - DNA, 472 bp, Homo sapiens
  misc_feature (250)..(291): n includes a, c, g, or t, or contains no nucleotide
  misc_feature (366)..(381): n includes a, c, g, or t, or contains no nucleotide
gaacattgactccttacgaaagtcacttcattctaactagatgcgcccacttccggtcattatttcgtttgcatgatgtattgcttcttcacgttttgtttttattgagcacggagtagaattccagggctgccttgacttcttccctgcatgctccctcccagtgactttccttccctttcacatgaggatctgccgttcatgttgctttctcctttgtcctcttggacttgagggcattgtgaaaagnnnnnnnnnnnnnnnnnnnnnnnnnnnnnnnnnnnnnnnnnngcagtgttgaagctgggaattttttggcgcaatccatgtagcagtgacccaggcttgggagccagaaacaagtgnnnnnnnnnnnnnnnnttaacacaactgttgccaaagagttggctttgtttatttggttttggcggggagaggagtggtatttgatgctttctgtggacaatgtaac

SEQ ID NO: 4787 - DNA, 177 bp, Homo sapiens
  misc_feature (77)..(92): n includes a, c, g, or t, or contains no nucleotide
cccgtcctgtgggctgcacagctcaccttgttccctcctgccccggttcgagagccgagtctgtgggcactctctgnnnnnnnnnnnnnnnnctttctaacacgtcgccttcaactgtaatcacaacatcctgactccgtcatttaataaagaaggaacatcaggcatgctaaaaaa

SEQ ID NO: 4788 - DNA, 392 bp, Homo sapiens
  misc_feature (255)..(255): n includes a, c, g, or t, or contains no nucleotide
  misc_feature (258)..(260): n includes a, c, g, or t, or contains no nucleotide
  misc_feature (341)..(341): n includes a, c, g, or t, or contains no nucleotide
cgcttggacggctgggcacacgcctcccactggggtccagggagcaggcggtgggcacccaccctgggacctaggggcgccgcaaaccacactggactccggccctcctaccctgcgcccagtccttccacctcgacgtttacaagcccccccttccacttttttttgtatgttttttttctgctggaaacagactcgattcatattgaatataatatatttgtgtatttaacagggaggggaagagggggcgantcnnnggcggagctggccccgccgcctggtactcaagcccgcggggacattgggaaggggacccccgccccctgccctcccctctntgcaccgtactgtggaaaagaaacacgcacttagtctctaaagagtttatt

SEQ ID NO: 4789 - DNA, 561 bp, Homo sapiens
  misc_feature (429)..(452): n includes a, c, g, or t, or contains no nucleotide
tattgtccaggtgaggcccaagagccctgtggccgccacctgaggtgggctggggctgctcccctaaccctactttcgttccgccactcagccatttccccctcctcagatggggcaccaataacaaggagctcaccctgcccgctcccaacccccctcctgctcctccctgccccccaaggttctggttccatttttcctctgttcacaaactacctctggacagttgtgttgttttttgttcaatgttccattcttcgacatccgtcattgctgctgctaccagcgccaaatgttcatcctcattgcctcctgttctgcccacgatcccctcccccaagatactctttgtggggaagaggggctggggcatggcaggctgggtgaccgactaccccagtcccagggaaggtggggccctgcccctannnnnnnnnnnnnnnnnnnnnnnnggggcccgaatcgaccataaagggtgtaggggccacctcctccccctgttctgttggggaggggtagccatgatttgtcccagcctggggctccctctctggtttccta

SEQ ID NO: 4790 - DNA, 534 bp, Homo sapiens
ctagttctacctcaggcagctcaagcagcgaccgccccctcctctagctgtgggggtgagggtcccatgtggtggcacaggcccccttgagtggggttatctctgtgttaggggtatatgatgggggagtagatctttctaggagggagacactggcccctcaaatcgtccagcgaccttcctcatccaccccatccctccccagttcattgcactttgattagcagcggaacaaggagtcagacattttaagatggtggcagtagaggctatggacagggcatgccacgtgggctcatatggggctgggagtagttgtctttcctggcactaacgttgagcccctggaggcactgaagtgcttagtgtacttggagtattggggtctgaccccaaacaccttccagctcctgtaacatactggcctggactgttttctctcggctccccatgtgtcctggttcccgtttctccacctagactgtaaacctctcgagggcagggaccacaccctgtactgttctgtgtctttca

SEQ ID NO: 4791 - DNA, 388 bp, Homo sapiens
  misc_feature (124)..(124): n includes a, c, g, or t, or contains no nucleotide
  misc_feature (348)..(348): n includes a, c, g, or t, or contains no nucleotide
  misc_feature (350)..(350): n includes a, c, g, or t, or contains no nucleotide
tggcggacacgttccgggacttcgccgtctccactgtgccagtctcgggtccctcccacctgcgcggtctctgcggcatggggggacctcgcactgttgtggcaggcagcagcgacgctgcccnaaaaggctgtccgggcaatggcagtgctgacagatcacccatatgcctccctgaccctcccagatgacgcagctgctgactgtctctttcttcgtcctgggttgcctggtgtgccccctttcctcctgcaccgtggaggtggggatctgcccaacagccaggaggcactgcagaagctctctgatgtcaccctggtacctgtgtcctgctcagaactggagaangntggcgccgggctcagctccctctgcttggtgctcagca

SEQ ID NO: 4792 - DNA, 93 bp, Homo sapiens
tctccagtcaggaggcatagtttttagtgaacaatcaaagcacttggactcttgctctttctactctgaactaataaagctgttgccaagctg

SEQ ID NO: 4793 - DNA, 259 bp, Homo sapiens
  misc_feature (50)..(50): n includes a, c, g, or t, or contains no nucleotide
  misc_feature (69)..(69): n includes a, c, g, or t, or contains no nucleotide
  misc_feature (82)..(82): n includes a, c, g, or t, or contains no nucleotide
  misc_feature (94)..(112): n includes a, c, g, or t, or contains no nucleotide
  misc_feature (159)..(159): n includes a, c, g, or t, or contains no nucleotide
  misc_feature (162)..(176): n includes a, c, g, or t, or contains no nucleotide
  misc_feature (194)..(194): n includes a, c, g, or t, or contains no nucleotide
acacaattaggctggctaacggatagtgagcttgtgcccctgcctaggtngcctgtgctgggtgtccancctgtgcccccancctgggtgcccnnnnnnnnnnnnnnnnnnnggccagacctgcccctccaaactccacagtatgggaccctggagggntannnnnnnnnnnnnnnatgcctccacctagaagntgaatagtgacgccctcccccaagcccacccagccgcacacaggcctagaggtaaccaataaagt

SEQ ID NO: 4794 - DNA, 502 bp, Homo sapiens
  misc_feature (55)..(57): n includes a, c, g, or t, or contains no nucleotide
  misc_feature (59)..(61): n includes a, c, g, or t, or contains no nucleotide
  misc_feature (63)..(64): n includes a, c, g, or t, or contains no nucleotide
  misc_feature (114)..(114): n includes a, c, g, or t, or contains no nucleotide
  misc_feature (123)..(123): n includes a, c, g, or t, or contains no nucleotide
  misc_feature (265)..(293): n includes a, c, g, or t, or contains no nucleotide
  misc_feature (417)..(419): n includes a, c, g, or t, or contains no nucleotide
acaagctggccagaagggagaccagggagtgaaaggatcttctggggagcaaggnnnannngnngaaaaaggtgaaagaggtgaaaactcagtgtccgtcaggattgtcggcantagtaaccnaggccgggctgaagtttactacagtggtacctgggggacaatttgcgatgacgagtggcaaaattctgatgccattgtcttctgccgcatgctgggttactccaaaggaagggccctgtacaaagtgggagctggcactggnnnnnnnnnnnnnnnnnnnnnnnnnnnnnggggcacggagagtaccctgtggagctgcaccaagaatagctggggccatcatgactgcagccacgaggaggacgcaggcgtggagtgcagcgtctgacccggaaaccctttcacttctctgcnnnccgaggtgtcctcgggctcatatgtgggaaggcagaggatctctgaggagttccctggggacaactgagcagcctctggagag

SEQ ID NO: 4795 - DNA, 582 bp, Homo sapiens
  misc_feature (31)..(31): n includes a, c, g, or t, or contains no nucleotide
  misc_feature (36)..(36): n includes a, c, g, or t, or contains no nucleotide
  misc_feature (58)..(58): n includes a, c, g, or t, or contains no nucleotide
  misc_feature (102)..(102): n includes a, c, g, or t, or contains no nucleotide
  misc_feature (117)..(117): n includes a, c, g, or t, or contains no nucleotide
  misc_feature (125)..(125): n includes a, c, g, or t, or contains no nucleotide
  misc_feature (133)..(133): n includes a, c, g, or t, or contains no nucleotide
  misc_feature (137)..(137): n includes a, c, g, or t, or contains no nucleotide
  misc_feature (143)..(143): n includes a, c, g, or t, or contains no nucleotide
  misc_feature (156)..(156): n includes a, c, g, or t, or contains no nucleotide
  misc_feature (167)..(167): n includes a, c, g, or t, or contains no nucleotide
  misc_feature (173)..(173): n includes a, c, g, or t, or contains no nucleotide
  misc_feature (214)..(214): n includes a, c, g, or t, or contains no nucleotide
  misc_feature (223)..(223): n includes a, c, g, or t, or contains no nucleotide
  misc_feature (252)..(252): n includes a, c, g, or t, or contains no nucleotide
  misc_feature (423)..(447): n includes a, c, g, or t, or contains no nucleotide
  misc_feature (478)..(478): n includes a, c, g, or t, or contains no nucleotide
  misc_feature (523)..(524): n includes a, c, g, or t, or contains no nucleotide
  misc_feature (526)..(526): n includes a, c, g, or t, or contains no nucleotide
  misc_feature (528)..(531): n includes a, c, g, or t, or contains no nucleotide
ttttctggtaggaatagcatgtcactaaagncaggnccttttgatattaaattttttnaaaaagcaaaattatagaagtttagattttaatcaaatttgtangggtttctaggtaantttttacnagaattgncttngtttgncttcaactgtctncctacctctgnctcttnggaggagatggggacagggctggagtcaaaacacttgtaanttttgtatncttgatgtctttgttaagactgctgaagnaattattttttttcttttataataaggaataaaccccacctttattccttcatttcatctaccattttctggttcttgtgttggctgtggcaggccagctgtggttttcttttgccatgacaacttctaattgccatgtacagtatgttcaaagtcaaataactcctcatnnnnnnnnnnnnnnnnnnnnnnnnnaagcagcacttataaatcagcctaacataanaaaaaaaaaaaaaaaaaaaaaaaaaaaaaaaaaaaaaaaaaaaannanannnntttatttcctaaaacaggcaaaataagctcaagtttatgtactctgagttt

SEQ ID NO: 4796 - DNA, 547 bp, Homo sapiens
gccgtgcaggccatgaaccgcatctgtgtgctggacgtggacctgcagggtgtgcggaacatcaaggccaccgatctgcggcccatctacatctctgtgcagccgccttcactgcacgtgctggagcagcggctgcggcagcgcaacactgaaaccgaggagagcctggtgaagcggctggctgctgcccaggccgacatggagagcagcaaggagcccggcctgtttgatgtggtcatcattaacgacagcctggaccaggcctacgcagagctgaaggaggcgctctctgaggaaatcaagaaagctcaaaggaccggcgcctgaggcttgctgtctgttctcggcaccccgggcccatacaggaccagggcagcagcattgagccacccccttggcaggcgatacggcagctctgtgcccttggccagcatgtggagtggaggagatgctgcccctgtggttggaacatcctgggtgacccccgacccagcctcgctgggctgtcccctgtccctatctctcactctggacccagggctgacat

SEQ ID NO: 4797 - DNA, 128 bp, Homo sapiens
gaagaagttccattcctttctgattggcacacgtgcagctcatgacaatctgtaggataacaatcagtgtggatttccactcttttcagtccttcatgttaaagatttagacaccacatacaactggt

SEQ ID NO: 4798 - DNA, 509 bp, Homo sapiens
  misc_feature (26)..(53): n includes a, c, g, or t, or contains no nucleotide
  misc_feature (134)..(159): n includes a, c, g, or t, or contains no nucleotide
  misc_feature (322)..(348): n includes a, c, g, or t, or contains no nucleotide
  misc_feature (420)..(420): n includes a, c, g, or t, or contains no nucleotide
  misc_feature (441)..(478): n includes a, c, g, or t, or contains no nucleotide
  misc_feature (480)..(481): n includes a, c, g, or t, or contains no nucleotide
  misc_feature (483)..(483): n includes a, c, g, or t, or contains no nucleotide
gttgcagacggaggtcaggtcttccnnnnnnnnnnnnnnnnnnnnnnnnnnnnagcaaacgcccacagatggcccagaggtggtggtagtcagggtgtgtgggtgtttttagggttctttagtgttgtttcttnnnnnnnnnnnnnnnnnnnnnnnnnngtttggtgctgacggtgagaggaaattagaatctgtttgcaaattgtccaacccaccccctcaacatgaggggcttccattttctgtgttttgtaagggaactgtttccttcatgccgccatgttcctgatattagttctgatttctttttaacaaatgttannnnnnnnnnnnnnnnnnnnnnnnnnntaatggccaattaactgagaatgtaagaaaattgatgctgtacaaggcaaataaagctgtttattaaccttnaaaaaaaaaaaaaaaaaaaannnnnnnnnnnnnnnnnnnnnnnnnnnnnnnnnnnnnnanncngccatgttcctgatattagttctgat

SEQ ID NO: 4799 - DNA, 320 bp, Homo sapiens
  misc_feature (30)..(30): n includes a, c, g, or t, or contains no nucleotide
  misc_feature (35)..(35): n includes a, c, g, or t, or contains no nucleotide
  misc_feature (43)..(43): n includes a, c, g, or t, or contains no nucleotide
  misc_feature (62)..(62): n includes a, c, g, or t, or contains no nucleotide
  misc_feature (81)..(81): n includes a, c, g, or t, or contains no nucleotide
  misc_feature (202)..(202): n includes a, c, g, or t, or contains no nucleotide
  misc_feature (208)..(208): n includes a, c, g, or t, or contains no nucleotide
  misc_feature (211)..(212): n includes a, c, g, or t, or contains no nucleotide
  misc_feature (215)..(219): n includes a, c, g, or t, or contains no nucleotide
  misc_feature (221)..(221): n includes a, c, g, or t, or contains no nucleotide
  misc_feature (224)..(224): n includes a, c, g, or t, or contains no nucleotide
  misc_feature (227)..(229): n includes a, c, g, or t, or contains no nucleotide
  misc_feature (231)..(234): n includes a, c, g, or t, or contains no nucleotide
  misc_feature (237)..(238): n includes a, c, g, or t, or contains no nucleotide
  misc_feature (240)..(240): n includes a, c, g, or t, or contains no nucleotide
  misc_feature (258)..(280): n includes a, c, g, or t, or contains no nucleotide
cagggcctaaaagatgctggtcctcccaanctcantctcagantccctgccaccttttcccntgggttctgccgtcttgcntcacttcccctcctgtcacatgctgacgttggacttagcaggttctaaggccacatgtgtgacctctctgacttctcttcctccaccaaggcagctttccttaccctgacacagccccagnccccanaannccnnnnngnccnggnnngnnnnggnnangactgacagaccccaggnnnnnnnnnnnnnnnnnnnnnnngctggcccgtttgggacagctgaccaataaacactgatgg

SEQ ID NO: 4800 - DNA, 301 bp, Homo sapiens
  misc_feature (140)..(160): n includes a, c, g, or t, or contains no nucleotide
acctctgcgccatgagagccaagtggaggaagaagcgaatgcgcaggctgaagcgcaaaagaagaaagatgaggcagaggtccaagtaaaccgctagcttgttgcaccgtggaggccacaggagcagaaacatggaatgnnnnnnnnnnnnnnnnnnnnnacaagttgtgggactgcatgctactgtctagagcttgtctcaatggatctagaacttcatcgccctctgatcgccgatcacctctgagacccaccttgctcataaacaaaatgcccatgttggtcctctgccctggacctg

SEQ ID NO: 4801 - DNA, 502 bp, Homo sapiens
  misc_feature (30)..(30): n includes a, c, g, or t, or contains no nucleotide
  misc_feature (58)..(58): n includes a, c, g, or t, or contains no nucleotide
  misc_feature (60)..(88): n includes a, c, g, or t, or contains no nucleotide
  misc_feature (90)..(110): n includes a, c, g, or t, or contains no nucleotide
  misc_feature (116)..(116): n includes a, c, g, or t, or contains no nucleotide
  misc_feature (119)..(119): n includes a, c, g, or t, or contains no nucleotide
  misc_feature (124)..(124): n includes a, c, g, or t, or contains no nucleotide
  misc_feature (259)..(287): n includes a, c, g, or t, or contains no nucleotide
ctgccggatgacattgaggacgagtccacnggcctgaagaagattgaggaacagttgncnnnnnnnnnnnnnnnnnnnnnnnnnnnnncnnnnnnnnnnnnnnnnnnnnnagttantgncagcntgcccaggttcaaactggaagagagttacactctcaactccgacctcgcccgcctaggtgtgcaggatctctttaacagtagcaaggctgatctgtctggcatgtcaggagccagagatatttttatatcaaaannnnnnnnnnnnnnnnnnnnnnnnnnnnntgaagagggaacagaggcggcagctgccacagcaggcatcgcaactttctgcatgttgatgcccgaagaaaatttcactgccgaccatccattccttttctttattcggcataattcctcaggtagcatcctattcttggggagattttcttccccttagaagaaagagactgtagcaatacaaaaatcaagcttagtgctttattacctgagtt

SEQ ID NO: 4802 - DNA, 474 bp, Homo sapiens
  misc_feature (414)..(430): n includes a, c, g, or t, or contains no nucleotide
aggaagacgctgcagtgaattgcacagatatttcagtgcagaaaaccccacaaaaagccacaacaggtcgctcatcccgtcagtcatcctttattgcagtcgggatccttggggttgttctgttggccattttcgtcgcattattcttcttgactaaaaagcgaagacagagacagcggcttgcagtttcctcaagaggagagaacttagtccaccaaattcaataccgggagatgaattcttgcctgaatgcagatgatctggacctaatgaattcctcaggaggccattctgagccacactgaaaaggaaaatgggaatttataacccagtgagttcagcctttaagataccttgatgaagacctggactattgaatggagcagaaattcacctctctcactgactattacnnnnnnnnnnnnnnnnngttcttcttctcctaggattcctaagactgctgctgaatttata

SEQ ID NO: 4803 - DNA, 426 bp, Homo sapiens
  misc_feature (63)..(63): n includes a, c, g, or t, or contains no nucleotide
  misc_feature (169)..(169): n includes a, c, g, or t, or contains no nucleotide
  misc_feature (304)..(339): n includes a, c, g, or t, or contains no nucleotide
cgatgttgttgtcctgcaggaacagtgtctgcaggccggggaaagaggaggcgcttaccccgntgcgggggtcttcctctccctgggggcaccccgtcctcccgcagctccacacggtgcccacctgcgtccctggcgggattcccagcgggacgacgcgcaaccgcanggcgccacactccaccgtggcgctgtagcagcggcaggctgctgggcagccggcggcgcggagcggcagtagtagcagcagcagcggcagcagtgcgggggccctcagggccatctcccgaggcccggttcctcnnnnnnnnnnnnnnnnnnnnnnnnnnnnnnnnnnnnctcctgaaacacaggttggcaggccagtctcggcagtcgagagccagccaatagatggaatggaggcctgcacctgcgtctaacttt

SEQ ID NO: 4804 - DNA, 565 bp, Homo sapiens
agaccctgctctgcaagcagctgacctacacctacccctgggtctataactaccagctggaagggatctttgcccaggaattccccgacttggagaatgtggtcaagggccaccacgttagccaagaaccctggaacagcagcatcacactcacatcccaggccggggctgttttccagagctttgccaagttcagcaaatttggagatgacctgtactccggctggttggcagcagcccttggtaccaacctgcaggtccagttctggcacaaaactgtaggcatcctgccctctaactgctcggatatctggcaggttctgaatgtgaaccagatagctttccctggaccagccggcccaagcttcaacagcacagaggaccactccaaatggtgcgtgtccccaaaagggccctggacctgcgtgggtgacatgaatcggaaccagggagaggagcaacggggtgggggcacactgtgtgcccagctgccagccctctggaaagccttccagccgctggtgaagaactaccagccctgtaatggcatggccaggaagcccag

SEQ ID NO: 4805 - DNA, 55 bp, Homo sapiens
caaatttcattgcactttcctttcaataaagttgttgcattcccaattggtgttt

SEQ ID NO: 4806 - DNA, 434 bp, Homo sapiens
ttgcacagcagaaaacagaattgaagttgggaaactctagagtctgggcaaaatgtttggttttttctcttaaaaaaaataacaccccattaccaaaagaaaaggtaaggtggcaaccttatttttaatagtttgaaatgatgataatcctaattatataaaaatatatatataaacacacatatatatagtgatttctaaagatttgtttacttttgtgttttgttttactgtactaagaacttgtcctttctccttgaatcaaagtaggacatgcatcatcctcctaattttaaatgttggctctgattttaaagtggtgcatttgattccagccttggtaatggagagtttgcaaacacacagcggcccacagcttcacgtggtggtgtgcagtgtgaggcagctccttggctttcctggttttcacaaca

SEQ ID NO: 4807 - DNA, 365 bp, Homo sapiens
  misc_feature (72)..(72): n includes a, c, g, or t, or contains no nucleotide
ggtggccacgtcacaacctctgatctcagaccgtgcatgccttgtcctcttaagacaactcctgtggcaccntttctccctccacagggccaaagccatagtgtccggtcccaaggacaaggctcttccagtgctaggagaggtatgagcagcctctcacctgtgagctgtggggatcacaaggctgcctgcctcagtcttggagtcctgttgggtgaatgaggcagatgggaaagagcctcaccagcagctgcttttggagcaggggtccaaggaagagagggtggcctcgacatcaaactgcctggatttttctaccaccctgttacatcataacaacttctgaaacacacaccagccctgag

SEQ ID NO: 4808 - DNA, 471 bp, Homo sapiens
  misc_feature (100)..(100): n includes a, c, g, or t, or contains no nucleotide
  misc_feature (172)..(196): n includes a, c, g, or t, or contains no nucleotide
  misc_feature (264)..(264): n includes a, c, g, or t, or contains no nucleotide
taagaaacacttgcagctctagtattcacttgagtcttcctgtttttcctgtaccgggtcatggtaatttttggttgttttggttgttttcttaaaaaancaagttaaaacctgacgatttctgcaggctgtgtaagcatgtttacctgttggcttgctttgtgtgtctgtnnnnnnnnnnnnnnnnnnnnnnnnnaaaataaatcgacagtgtctcagaactgaataactgcagtgacttgatgctctaaaacagtgtagganttaagaatagatggtttttaatcctggaaattgtgattgtgacccatgagtggaggaactttcagttctaaagctgataaagtgtgtagccagaagagtacttttttttttgtaaccactgtcttgatggcaaaataattatggtaaaaaacaagtctcgtgtttattattccttaagaactctgtgttatattaccatggaacgcc

SEQ ID NO: 4809 - DNA, 366 bp, Homo sapiens
  misc_feature (26)..(40): n includes a, c, g, or t, or contains no nucleotide
ggatcccgaagaatggagaggaacannnnnnnnnnnnnnngagcagcctggagacccaccccacctgcagggctgccctgagcgcctggatttctggttctgatgccaatactagtcaccccaagtagtctgctcacagtaacccaaacctcaagtaaactcccctttccctcgctatgtgcactgatatgggtttataattttctgaaagttacccactgaagcccatttctccgttgagtcatcttgtaatttccagctttctccccgctaaggaagatatctagtgttggggatcctggcccctcaacctcctgtggaacccagcagttctgttatatcccctgctaccctagatgaattaag

SEQ ID NO: 4810 - DNA, 427 bp, Homo sapiens
  misc_feature (132)..(166): n includes a, c, g, or t, or contains no nucleotide
  misc_feature (168)..(178): n includes a, c, g, or t, or contains no nucleotide
  misc_feature (181)..(184): n includes a, c, g, or t, or contains no nucleotide
  misc_feature (187)..(190): n includes a, c, g, or t, or contains no nucleotide
  misc_feature (193)..(194): n includes a, c, g, or t, or contains no nucleotide
  misc_feature (198)..(203): n includes a, c, g, or t, or contains no nucleotide
  misc_feature (205)..(208): n includes a, c, g, or t, or contains no nucleotide
  misc_feature (341)..(358): n includes a, c, g, or t, or contains no nucleotide
acgtgctcctcagagcagccggagggaggggggaggtcggaggtcgtggaggtggtttgtgtatcttactggtctgaagggaccaagtgtgtttgttgtttgttttgtatcttgtttttctgatcggagcannnnnnnnnnnnnnnnnnnnnnnnnnnnnnnnnnnannnnnnnnnnnaannnnagnnnnggnngggnnnnnngnnnnggatcacttgggatctttgacacttgaaaaattacacctggcagctgcgtttaagccttcccccatcgtgtactgcagagttgagctggcaggggaggggctgagagggtgggggctggaacccctccccggnnnnnnnnnnnnnnnnnncttccatctagaactgtttacatgaagataagatactcactgttcatgaatacacttgatgttcaagta

SEQ ID NO: 4811 - DNA, 159 bp, Homo sapiens
cacgctggccgagtactgcgtgaagaccaaggcgccggcgcccgacgagggctcagacctcttctacgacgactactacgaggacggcgaggtggaggaggaggccgacagctgcttcggggacgatgaggatgactctggcacggaggagtcctgaca

SEQ ID NO: 4812 - DNA, 447 bp, Homo sapiens
ttctaaagagcctgcgaaagccttttggtgactttatggagcccaagtttgagtttgctgtgaagttcaatgcactggaattagatgacagcgacttggcaatatttattgctgtcattattctcagtggagaccgcccaggtttgctgaatgtgaagcccattgaagacattcaagacaacctgctacaagccctggagctccagctgaagctgaaccaccctgagtcctcacagctgtttgccaagctgctccagaaaatgacagacctcagacagattgtcacggaacacgtgcagctactgcaggtgatcaagaagacggagacagacatgagtcttcacccgctcctgcaggagatctacaaggacttgtactagcagagagtcctgagccactgccaacatttcccttcttccagttgcactattctgagggaaaatctga

SEQ ID NO: 4813 - DNA, 482 bp, Homo sapiens
  misc_feature (390)..(390): n includes a, c, g, or t, or contains no nucleotide
  misc_feature (395)..(399): n includes a, c, g, or t, or contains no nucleotide
  misc_feature (407)..(407): n includes a, c, g, or t, or contains no nucleotide
  misc_feature (410)..(410): n includes a, c, g, or t, or contains no nucleotide
cttaggcatgagtccttagggagaagttaatgaccattgttaaagtgcttttttagaaaatgttgtgctgtatgttcttgatttgacataaatgaatagactttggcaagggaggaaataagttaaaaggcagcttacaagagcctattccctataaagggtataattttacacagtactcaaagcttgttatcttttctgaccattttagtacagaattagtacttggtggttactaacatcaacttgtgacatctagaactagggctcttagtgtttagtgggccacttctctgatgtcagatgcatgcagacctgtactccacatgcaacccaacagcagtgcagtgtgataactgagcggtcgcatggcagaggacatccccctcnagagnnnnncacaagtnccntctagggcagccaggggaatactattgttcgatacctgggatttgactttgtcaaacagctctttgtgcccc

SEQ ID NO: 4814 - DNA, 147 bp, Homo sapiens
aagttaagccatctcctcctctggcccttccttctggaatcttcagatgcctgttaggccttcttattgtcctcctcctcctggctcggcctccctcacactgaccaagggcctgtgctgcccactgggtaacttctacagttctcc

SEQ ID NO: 4815 - DNA, 253 bp, Homo sapiens
  misc_feature (133)..(182): n includes a, c, g, or t, or contains no nucleotide
agagccagtaccaacagcagccatgatagggaggaccagggcagggccagggggtgcccaggtggtggctgcaaggtggctccagcaccatccgccagggcccacacccccttcctactcccagacacccacnnnnnnnnnnnnnnnnnnnnnnnnnnnnnnnnnnnnnnnnnnnnnnnnnngaaaatctctttttgactcttgcaatccacaatctgacattctcaggaagcccccaagttgatatttctat

SEQ ID NO: 4816 - DNA, 246 bp, Homo sapiens
  misc_feature (46)..(46): n includes a, c, g, or t, or contains no nucleotide
  misc_feature (81)..(81): n includes a, c, g, or t, or contains no nucleotide
  misc_feature (83)..(83): n includes a, c, g, or t, or contains no nucleotide
  misc_feature (87)..(87): n includes a, c, g, or t, or contains no nucleotide
aggagaagtcgattctccggcaacgacgctgtctgccccaggagcngcccggctcagccacagatgcctgaggacctcganangggntcaccccctccctcccacccctggactgggctgggggtggccccgtgggggtagctcactccccctcctgctgctatgcctgtgacccccgcggcccacacactggactgacctgccctgagcggggatgcagtgttgcactgatgacttgaccagccc

SEQ ID NO: 4817 - DNA, 475 bp, Homo sapiens
tgggcgcttcccttttaagcaagggcgcctcacctgctcttcaagaaacagcgagagggagacccagggggctgaaacttgaactctggttcttttaaaattaattttggttggtgttgggggaggcgcgagtgcgtgtgagaagaaccgacccaccccgcgcaaggggaagcctcctgtctcccctttccccgcgtccgagaaggcggaaacccacagtgttacctgacttatgaaacttgaaaccgcctctggagccgccattctgcagagtatttggaaaaagaaaaaagggtttatgcttacgtctctggggtcggggggattatgtcacgagcgttcaaactgctggaaatctcaaaactgtactgtctttatttttgtatattgtatttatatataaaaagaaacgtctacgtatgcatgctaaattattatttagcttctcccatcgcccacgatggaatgtaaaata

SEQ ID NO: 4818 - DNA, 519 bp, Homo sapiens
  misc_feature (67)..(67): n includes a, c, g, or t, or contains no nucleotide
  misc_feature (299)..(317): n includes a, c, g, or t, or contains no nucleotide
  misc_feature (403)..(405): n includes a, c, g, or t, or contains no nucleotide
  misc_feature (407)..(407): n includes a, c, g, or t, or contains no nucleotide
  misc_feature (410)..(411): n includes a, c, g, or t, or contains no nucleotide
  misc_feature (414)..(414): n includes a, c, g, or t, or contains no nucleotide
  misc_feature (418)..(432): n includes a, c, g, or t, or contains no nucleotide
  misc_feature (435)..(436): n includes a, c, g, or t, or contains no nucleotide
  misc_feature (484)..(484): n includes a, c, g, or t, or contains no nucleotide
gtgtaggcgaacttccctcatttctctctgcaatctgcaaataactcctccattgaaataactcctnccccaccccaacaacaacattcccagcagaccaactcccaccccctctttgaggtaaaagtgcctttattgggagacttttgtcttccagcctgccaatcaaccctcctgggtgtggccaccatatgtgtgtgcctaggtcctccttctgcacgatccaataggagacaccagttctgactgaaccatgcccccacctaagtcacaaaatgagggaagtggggagttagatnnnnnnnnnnnnnnnnnnngttgggacccactccaaataatctcctcggtgtgggtggtggttctatagagggataaatgaataataaacattgttaaaatatannnanaannaanaaannnnnnnnnnnnnnnaanntgggtaaatttcaagcatcaggagggggaaatggagtggaaacagctnggggcaaggaggcaaagaagccaggcctgttttac

SEQ ID NO: 4819 - DNA, 409 bp, Homo sapiens
  misc_feature (136)..(136): n includes a, c, g, or t, or contains no nucleotide
  misc_feature (154)..(154): n includes a, c, g, or t, or contains no nucleotide
  misc_feature (158)..(158): n includes a, c, g, or t, or contains no nucleotide
  misc_feature (179)..(179): n includes a, c, g, or t, or contains no nucleotide
  misc_feature (188)..(188): n includes a, c, g, or t, or contains no nucleotide
  misc_feature (225)..(239): n includes a, c, g, or t, or contains no nucleotide
  misc_feature (317)..(317): n includes a, c, g, or t, or contains no nucleotide
  misc_feature (319)..(319): n includes a, c, g, or t, or contains no nucleotide
  misc_feature (338)..(338): n includes a, c, g, or t, or contains no nucleotide
  misc_feature (355)..(355): n includes a, c, g, or t, or contains no nucleotide
ttggtatttgcaatttgctatctaccaattagcatcctcaatgtgctaaagagagtatttgggatgtttgcccatactgaagacagagagactgtgtatgcctggtttaccttttcacactggcttgtatatgccnaatagtgctgcgaatccnaatnatttataattttctcagtggnaaatttcgnagaggaatttaaagctgcgttttcttgctgttgcctnnnnnnnnnnnnnnnccaggaggatcggctcaccaggggacgaactagcacagagagccggaagtccttgaccactcaaatcagcaactttgntnacatatcaaaactttctgngcaagttgtgctcactngcataagcacactcccagcagccaatggagcaggaccacttcaaaactggtaga

SEQ ID NO: 4820 - DNA, 435 bp, Homo sapiens
  misc_feature (30)..(50): n includes a, c, g, or t, or contains no nucleotide
  misc_feature (113)..(113): n includes a, c, g, or t, or contains no nucleotide
  misc_feature (147)..(161): n includes a, c, g, or t, or contains no nucleotide
  misc_feature (304)..(304): n includes a, c, g, or t, or contains no nucleotide
accctgaggaagacctcacagctgacaagnnnnnnnnnnnnnnnnnnnnnctgtataaggtctctgatgccactggacagatgaacctgaccaaggtggctgactccagcccntttgcccttgaactgctgatatctgatgactgcnnnnnnnnnnnnnnngggctctgtggcaagatctatatctggaaggggcgaaaagcgaatgagaaggagcggcaggcagccctgcaggtggccgagggcttcatctcgcgcatgcagtacgccccgaacactcaggtggagattctgcctcagggccntgagagtcccatcttcaagcaatttttcaaggactggaaatgagggtgggcgtcttcctgccccatgctcccctgccccccaccacctgcctgcttgcttctctggctgcctggtcagtgcagaggtgccc

SEQ ID NO: 4821 - DNA, 399 bp, Homo sapiens
  misc_feature (320)..(320): n includes a, c, g, or t, or contains no nucleotide
gacaggctctccagaagcaagccctgcaggagaaaggcaagcagcaggacacggtcctcggcggccgggccctgtccaaccggcagcacgcctcctaggaactgtgggagaccagcggagtgggagggagacgcagtagacagagacagaccgagaaggaagggagagacagagggggcgcgcgcacaggagcctgactccgctgggagagtgcaggagcacgtgctgttttttatttggacttaacttcagagaaaccgctgacatctagaactgacctaccacaagcatccaccaaaggagtttgggattgagttttnctgctgtgcagcactgcattgtcatgacatttccaacactgtgtgaattatctaaatgcgtctaccattttgcactagg

SEQ ID NO: 4822 - DNA, 328 bp, Homo sapiens
  misc_feature (188)..(188): n includes a, c, g, or t, or contains no nucleotide
cggacagcctgcagcacgtgctcttgccagtgctggaccgcgccacctgcaaccggcgcacgcaccacgacggcgccatcaccgagcgcttgatgtgcgcggagagcaatcgccgggacagctgcaagggtgactccgggggcccgctggtgtgcgggggcgtgctcgagggcgtggtcacctcgggntcgcgcgtttgcggcaaccgcaagaagcccgggatctacacccgcgtggcgagctatgcggcctggatcgacagcgtcctggcctagggtgccggggcctgaaggtcagggtcacccaagcaacaaagtcccgagcaatg

SEQ ID NO: 4823 - DNA, 558 bp, Homo sapiens
  misc_feature (45)..(45): n includes a, c, g, or t, or contains no nucleotide
  misc_feature (196)..(196): n includes a, c, g, or t, or contains no nucleotide
  misc_feature (327)..(347): n includes a, c, g, or t, or contains no nucleotide
  misc_feature (373)..(373): n includes a, c, g, or t, or contains no nucleotide
  misc_feature (429)..(429): n includes a, c, g, or t, or contains no nucleotide
  misc_feature (447)..(447): n includes a, c, g, or t, or contains no nucleotide
  misc_feature (449)..(449): n includes a, c, g, or t, or contains no nucleotide
actcaaagcctcctgcctatacgggcagctccccaagttccaggnacggagacctcaccctgtaccagtccaataccatcctgcgtcacctgggccgcacccttgggctctatgggaaggaccagcaggaggcagccctggtggacatggtgaatgacggcgtggaggacctccgctgcaaatacatctccctcantctacaccaactatgaggcgggcaaggatgactatgtgaaggcactgcccgggcaactgaagccttttgagaccctgctgtcccagaaccagggaggcaagaccttcattgtgggagaccagatctccttnnnnnnnnnnnnnnnnnnnnncttgctgctgatccatgaggtcctancccctggctgcctggatgcgttccccctgctctcagcatatgtggggcgcctcagngcccggcccaagctcaangnccttcctggcctcccctgagtacgtgaacctccccatcaatggcaacgggaaacagtgagggttggggggactctgagcgggaggcagagtttgccttcctttctccag

SEQ ID NO: 4824 - DNA, 194 bp, Homo sapiens
aggtgacttccatccaggactgggttcagaagaccatagctgagaactaatgcaaggctggccggaagcccttgcctgaaagcaagatttcagcctggaagagggcaaagtggacgggagtggacaggagtggatgcgataagatgtggtttgaagctgatgggtgccagccctgcattgctgagtcaatcaat

SEQ ID NO: 4825 - DNA, 382 bp, Homo sapiens
  misc_feature (121)..(160): n includes a, c, g, or t, or contains no nucleotide
acaaggccctcatagtagaaataaaaatatagatatctatgcttcccatctcgctctcagtggttcgaataacaagtgcaagtaacaaaatagattgtctctataattcgcaaactgggannnnnnnnnnnnnnnnnnnnnnnnnnnnnnnnnnnnnnnncccaaagtgtggtcttgtcgagggtgcagacaaggaccaaccaagttcaaccaagtctctcgtatgcagacgccagctccagtctcaaggagggtggggcttgcagtcagtctcactccacccccgagtggacagtctggaccctccgtgatggggaaggcggcagcgtgccccgccactccggcttctgctccatcccaaggcctcagcttcgggggtcct

SEQ ID NO: 4826 - DNA, 510 bp, Homo sapiens
  misc_feature (26)..(26): n includes a, c, g, or t, or contains no nucleotide
  misc_feature (89)..(89): n includes a, c, g, or t, or contains no nucleotide
  misc_feature (101)..(101): n includes a, c, g, or t, or contains no nucleotide
  misc_feature (165)..(165): n includes a, c, g, or t, or contains no nucleotide
  misc_feature (194)..(224): n includes a, c, g, or t, or contains no nucleotide
atcccatctgtgaggcggctctgccnaagttttctttctgtggaagaaggaaaggagagcagatttactatgctgggcctgtcaataantcctgaatttanctattcctcagggagaataccaggttttgctggaactgtacactgaaaaacggtccaccgtggncctgtgccaatgctactatcatgtgctcnnnnnnnnnnnnnnnnnnnnnnnnnnnnnnnagctgcatctcgtgggacctccaagctcctctgactgaacctactgtgggaggagaagcagctgatgacagagagaggctctacaaagaagcgcccccaaagagtgcagctgctaattttagtcccaggaccagacatccccagactccacagatgtaatgaagtccccgaatgtatctgtttctaaggagcctcttggcagtccttaagcagtcttgagggtccatcctttttctctaattggtcgcctcccaccagactcacctgcttttcaactttttaggag

SEQ ID NO: 4827 - DNA, 291 bp, Homo sapiens
  misc_feature (29)..(46): n includes a, c, g, or t, or contains no nucleotide
  misc_feature (259)..(259): n includes a, c, g, or t, or contains no nucleotide
ggactctggcgcactctagtggacaggannnnnnnnnnnnnnnnnnaacctgtggactaggggtgcagggacttccctttgcaaggggtaacagaccgctggaaaacactgtcactttcagagctcggtggctcacagcgtgtcctgccccggtttgcggacgagagaaatcgcggcccacaagcatccccccatcccttgcaggctgggggctgggcatgctgcatcttaaccttttgtatttattccctcaccttcntgcagggctccgtgcgggctgaaattaaagat

SEQ ID NO: 4828 - DNA, 278 bp, Homo sapiens
  misc_feature (74)..(93): n includes a, c, g, or t, or contains no nucleotide
  misc_feature (202)..(217): n includes a, c, g, or t, or contains no nucleotide
cggctgcttttatgtagtttaggctggaaatggtttcacttgctctttgactgtcagcaagactgaagatggcnnnnnnnnnnnnnnnnnnnnacacaaaatcttgtaggtcattgcacctatctcagccataggtgcagtttgcttctacatgatgctaaaggctgcgaatgggatcctgatggaactaaggactccaatnnnnnnnnnnnnnnnnctgcattcctttttcttcacttacaagaaaggcctgaatggaggacttttctgtaaccagg

SEQ ID NO: 4829 - DNA, 186 bp, Homo sapiens
  misc_feature (48)..(112): n includes a, c, g, or t, or contains no nucleotide
agatgatgatcagacccaagcactttaagccataaatcactctgttcnnnnnnnnnnnnnnnnnnnnnnnnnnnnnnnnnnnnnnnnnnnnnnnnnnnnnnnnnnnnnnnnntttcatatttttcatagctaaaaaatgatgtctgacggctaggttcttatgctacacagcatttgaaataaagc

SEQ ID NO: 4830 - DNA, 404 bp, Homo sapiens
  misc_feature (196)..(200): n includes a, c, g, or t, or contains no nucleotide
  misc_feature (310)..(310): n includes a, c, g, or t, or contains no nucleotide
ctgagtttgcggagaggtcagtaactaaattggagaaaagcattgatgacttagaagagaaagtggctcatgccaaagaagaaaaccttagtatgcatcagatgctggatcagactttactggagttaaacaacatgtgaaaacctccttagctgcgaccacattctttcattttgttttgttttgttttgttttnnnnntaaacacctgcttaccccttaaatgcaatttatttacttttaccactgtcacagaaacatccacaagataccagctaggtcagggggtggggaaaacacatacaaaaagncaagcccatgtcagggcgatcctggttcaaatgtgccatttcccgggttgatgctgccacactttgtagagagtttagcaacacagtgtgctta

SEQ ID NO: 4831 - DNA, 445 bp, Homo sapiens
  misc_feature (33)..(48): n includes a, c, g, or t, or contains no nucleotide
  misc_feature (278)..(320): n includes a, c, g, or t, or contains no nucleotide
ccaacagagcaatcaggattactaaaaaccagnnnnnnnnnnnnnnnncagagaaatttgcagagcagctgattcgagtatattgtaagaaggtggacagaaagagtttgtatgccgcaagacaatattttgttcagtggtgtgcagacagaaatttcaccaagccgcaggatggcgatgttatagccccactcataacacctcaaaaaaaggaatggaacgacagtacttcagtccaaaatccaactcgcctccgagaagcatccaaaagcagagtnnnnnnnnnnnnnnnnnnnnnnnnnnnnnnnnnnnnnnnnnnntgtttacaaactccctctcctgcacaattcatttagaggcttcaatcatagaattctgcaaattaatgacaactcatgctttaattttgtattttgaatgtacacgcatgctgaagctaagtaac

SEQ ID NO: 4832 - DNA, 542 bp, Homo sapiens
  misc_feature (397)..(437): n includes a, c, g, or t, or contains no nucleotide
tgaggcttttagttccctggcccgggacatcttgctcaagtcaggaggccggagatcaggaaacggcaacaagcctcccagtactgacctgaaaacttgtgacaagaagaacaccaacaagtgctccctgggctgaggaccctttcttgcctccccaccccggaagctgaacctgagggagacaacggcagagggagtgagcaggggagaaatagcagaggggcttggagggtcacataggtagatggtaaagagaatgaggagaaaaaggagaaaagggaaaagcagaaaggaaaaaaaggaagagagaggaagggagaagggagaggaatgaattgaggaagtgaaagaaggcaaggaggtaggaagagagggaggaggaaaggaaggagagatnnnnnnnnnnnnnnnnnnnnnnnnnnnnnnnnnnnnnnnnntaaatgtaaatacactgatttattctgttactagatcaggttttagggtcctgcaaaaggctagctcggcactacactagggaatttgctcctgttctgtcactt

SEQ ID NO: 4833 - DNA, 230 bp, Homo sapiens
atcagctcctgtctccagcagctttccctgttgatgtggatcacgcagtgctttctgcccgtgtttttggctcagcctccctcagggcagaggcgctaagcccagcctggcgccccttcctaggtcatgcctcctcccctagggaatggtcccagcacgagtggccagttcattgtgggggcctgattgtttgtcgctggaggaggacggcttacatgtttgtttctgta

SEQ ID NO: 4834 - DNA, 75 bp, Homo sapiens
gtcgtgtgcttggaggaagccgcggaacccccagcgtccgtccatggcgtggagccttgggagctggctgggtgg

SEQ ID NO: 4835 - DNA, 385 bp, Homo sapiens
  misc_feature (91)..(92): n includes a, c, g, or t, or contains no nucleotide
  misc_feature (113)..(113): n includes a, c, g, or t, or contains no nucleotide
  misc_feature (115)..(115): n includes a, c, g, or t, or contains no nucleotide
  misc_feature (118)..(118): n includes a, c, g, or t, or contains no nucleotide
  misc_feature (126)..(251): n includes a, c, g, or t, or contains no nucleotide
cctgtccggggtgtagtacgctgtcctagcggctgcccagttctcctgaccctcttagagactgttcttaggcctgaaaaggggctgggcnnccccccccaccaaggatggangnaanaccccctnnnnnnnnnnnnnnnnnnnnnnnnnnnnnnnnnnnnnnnnnnnnnnnnnnnnnnnnnnnnnnnnnnnnnnnnnnnnnnnnnnnnnnnnnnnnnnnnnnnnnnnnnnnnnnnnnnnnnnnnnnnnnntcctctcccttctgtgggtcgctcccagagccatggcccatgggaaggacagagtgtgtgtgtccttggggcctggggggatgttgctcctcagctccctccctcagccctgcccctctgagacaataaaactg

SEQ ID NO: 4836 - DNA, 494 bp, Homo sapiens
  misc_feature (107)..(109): n includes a, c, g, or t, or contains no nucleotide
  misc_feature (117)..(117): n includes a, c, g, or t, or contains no nucleotide
  misc_feature (121)..(121): n includes a, c, g, or t, or contains no nucleotide
  misc_feature (161)..(161): n includes a, c, g, or t, or contains no nucleotide
  misc_feature (439)..(441): n includes a, c, g, or t, or contains no nucleotide
  misc_feature (443)..(446): n includes a, c, g, or t, or contains no nucleotide
  misc_feature (448)..(448): n includes a, c, g, or t, or contains no nucleotide
  misc_feature (450)..(462): n includes a, c, g, or t, or contains no nucleotide
ccttggtcctacactttttaggatgcttggtgaacataacaccacttataatgaacatccctggttcctatattttgggctatgtgggtaggaattgttacttgttnnngcagcagncagnccctagaaagtaagcccagggcttcagatctaagttagtnccaaaagctaaatgatttaaagtcaagttgtaatgctaggcataagcactctataatacattaaattataggccgagcaattagggaatgtttctgaaacattaaacttgtatttatgtcactaaaattctaacacaaacttaaaaaatgtgtctcatacatatgctgtactaggcttcatcatgcatttctaaatttgtgtatgatttgaatatatgaaagaatttatacaagagtgttatttaaaattattaaaaataaatgtatataatttgtannnannnnanannnnnnnnnnnnntttttgtgtggtcagagttgtttcatgtcttc

SEQ ID NO: 4837 - DNA, 300 bp, Homo sapiens
tttatgtatgttacccttcagtaagttctccccattttagttttctaggactgaaaggattcttttctacattatacatgtgtgttgtcatatttggcttttgctatatactttaacttcattgttaaatttttgtattgtatagtttctttggtgtatcttaaaacctatttttgaaaaacaaacttggcttgataatcatttgggcagcttgggtaagtacgcaacttacttttccaccaaagaactgtcagcagctgcctgcttttctgtgatgtatgtatcctgttgacttttcca

SEQ ID NO: 4838 - DNA, 244 bp, Homo sapiens
  misc_feature (106)..(106): n includes a, c, g, or t, or contains no nucleotide
  misc_feature (148)..(148): n includes a, c, g, or t, or contains no nucleotide
  misc_feature (177)..(177): n includes a, c, g, or t, or contains no nucleotide
ggacctcactgacactatgattcctactctaccatgcaaggtcttggctacccttaattggactgtcagcctgaaaaacagcttttctattccttattttagtttnggttaccaagaaagtaaaatgaacagtaaaataaaactttcncttaaagaaaaaaggaacaaaaacaaaanttaaggaaagagaaaagaaacgtctccattcaattcacacacacctgggtcgcgtgctgcttcactc

SEQ ID NO: 4839 - DNA, 595 bp, Homo sapiens
tctgagcgtgtgggcatcctctctggccacgataacagggtgagctgcctgggagtcacagctgacgggatggctgtggccacaggttcctgggacagcttcctcaaaatctggaactgaggaggctggagaaagggaagtggaaggcagtgaacacactcagcagccccctgcccgaccccatctcattcaggtgttctcttctatattccgggtgccattcccactaagctttctcctttgagggcagtggggagcatgggactgtgcctttgggaggcagcatcagggacacaggggcaaagaactgccccatctcctcccatggccttccctccccacagtcctcacagcctctcccttaatgagcaaggacaacctgcccctccccagccctttgcaggcccagcagacttgagtctgaggccccaggccctaggattcctcccccagagccactacctttgtccaggcctgggtggtatagggcgtttggccctgtgactatggctctggcaccactagggtcctggccctcttcttattcatgctttctcctttttctacctttttttctctcctaagacacctgcaa

SEQ ID NO: 4840 - DNA, 518 bp, Homo sapiens
  misc_feature (387)..(390): n includes a, c, g, or t, or contains no nucleotide
  misc_feature (402)..(402): n includes a, c, g, or t, or contains no nucleotide
  misc_feature (405)..(406): n includes a, c, g, or t, or contains no nucleotide
  misc_feature (408)..(436): n includes a, c, g, or t, or contains no nucleotide
  misc_feature (438)..(438): n includes a, c, g, or t, or contains no nucleotide
tgtcagagtgtctgatgcggccactcattcggctccccagaattcctagactgggttaatagggtcatattgtgaatgtctcactacaaaatgacttgagtccagtgaaatctcattagggtttaagaatatttcagggatccttaatgttttgatttttgttttctgaaattggattttattttattttatcttataatttcagttcatctaaattgtgtgttctgtacatgtgatgtttgactgtaccattgactgttatggaagttcagcgttgtatgtctctctctacactgtggtgcacttaacttgtggaatttttatactaaaaatgtagaataaagactattttgaagatttgaataaagtgatgaagttgcattacannnnaaaaaaaaaaanaannannnnnnnnnnnnnnnnnnnnnnnnnnnnnantgcaaggattctttacttagcttgtttttagatttcttctatatatattttatttatatcccatctagaattcagctagg

SEQ ID NO: 4841 - DNA, 381 bp, Homo sapiens
  misc_feature (32)..(47): n includes a, c, g, or t, or contains no nucleotide
  misc_feature (142)..(142): n includes a, c, g, or t, or contains no nucleotide
  misc_feature (151)..(151): n includes a, c, g, or t, or contains no nucleotide
  misc_feature (215)..(248): n includes a, c, g, or t, or contains no nucleotide
tctggtcgccagcaacctgaatctcaaacctnnnnnnnnnnnnnnnntgcgaggcgaggtggctcctgacgctaagagcttcgtgctgaacctgggcaaagacagcaacaacctgtgcctgcacttcaaccctcgcttcaangcccacggngacgccaacaccatcgtgtgcaacagcaaggacggcggggcctgggggaccgagcagcgggagnnnnnnnnnnnnnnnnnnnnnnnnnnnnnnnnnnagaggtgtgcatcaccttcgaccaggccaacctgaccgtcaagctgccagatggatacgaattcaagttccccaaccgcctcaacctggaggccatcaactacatggcagctgacggtgacttcaagatcaaa

SEQ ID NO: 4842 - DNA, 610 bp, Homo sapiens
  misc_feature (48)..(88): n includes a, c, g, or t, or contains no nucleotide
  misc_feature (130)..(146): n includes a, c, g, or t, or contains no nucleotide
  misc_feature (201)..(201): n includes a, c, g, or t, or contains no nucleotide
  misc_feature (235)..(235): n includes a, c, g, or t, or contains no nucleotide
  misc_feature (422)..(424): n includes a, c, g, or t, or contains no nucleotide
  misc_feature (433)..(438): n includes a, c, g, or t, or contains no nucleotide
  misc_feature (440)..(445): n includes a, c, g, or t, or contains no nucleotide
  misc_feature (447)..(451): n includes a, c, g, or t, or contains no nucleotide
gagctcagcaggagggcaacattcatccgggtgacccagcagcacaannnnnnnnnnnnnnnnnnnnnnnnnnnnnnnnnnnnnnnnntcgagtggaagcgtccaaacctgcttttcccatctccccccnnnnnnnnnnnnnnnnngcttctggctgctcctgaatggtggaatgctgtgtcctctcttctgtctcctgcngcctggaggcttcggggctctcccgcctgccttntcggggcccagacgcaaggcaccgattgggccaacatcagagccctgctgcccagaactcataacctcattgttcaaaccaacacttgcacctttctctttttctctttctctctccctttctttgtttttctttcttttttaaaagaagatggtttcactttaatataatgctattatcttaagannnaaaaaaaannnnnnannnnnnannnnnaggagtcaagttgaatggtttgggatttgttttgctaccttcctagacaggctgatggcaagcctctcccggcgattagcagacaagtcaccttaggaggggcaaggagaggaggacagtgcgggggccaagggtggacaggccggagtcaaagtaact

SEQ ID NO: 4843 - DNA, 425 bp, Homo sapiens
  misc_feature (46)..(46): n includes a, c, g, or t, or contains no nucleotide
  misc_feature (53)..(56): n includes a, c, g, or t, or contains no nucleotide
  misc_feature (59)..(61): n includes a, c, g, or t, or contains no nucleotide
  misc_feature (63)..(65): n includes a, c, g, or t, or contains no nucleotide
  misc_feature (67)..(70): n includes a, c, g, or t, or contains no nucleotide
  misc_feature (72)..(74): n includes a, c, g, or t, or contains no nucleotide
  misc_feature (76)..(76): n includes a, c, g, or t, or contains no nucleotide
  misc_feature (80)..(81): n includes a, c, g, or t, or contains no nucleotide
  misc_feature (83)..(103): n includes a, c, g, or t, or contains no nucleotide
  misc_feature (335)..(350): n includes a, c, g, or t, or contains no nucleotide
  misc_feature (365)..(398): n includes a, c, g, or t, or contains no nucleotide
cctatgaggcaccacgtaagacctcctgcccttagctctcttgctnaccaccnnnnaannncnnnannnnannngngagnncnnnnnnnnnnnnnnnnnnnnngcccggctgcggaggaacccttggcaggcagaacctggaggtgtcagaggctcaactcctccatctaaccagcaggctcccagagtccccggaagagcctgcgcagctgaagcagagtgcttctagatggagagtggtcactggggaaaaggacctggccatcaccttccaatacctgctgcctgtctccctgacccatgatctggcaagttaggcacagtcagacatggannnnnnnnnnnnnnnnaaaagatgctctccnnnnnnnnnnnnnnnnnnnnnnnnnnnnnnnnnntgagctcccagggcaaggggttcacta

SEQ ID NO: 4844 - DNA, 464 bp, Homo sapiens
  misc_feature (55)..(55): n includes a, c, g, or t, or contains no nucleotide
  misc_feature (90)..(110): n includes a, c, g, or t, or contains no nucleotide
  misc_feature (112)..(113): n includes a, c, g, or t, or contains no nucleotide
  misc_feature (120)..(120): n includes a, c, g, or t, or contains no nucleotide
  misc_feature (126)..(126): n includes a, c, g, or t, or contains no nucleotide
  misc_feature (134)..(134): n includes a, c, g, or t, or contains no nucleotide
  misc_feature (149)..(149): n includes a, c, g, or t, or contains no nucleotide
  misc_feature (154)..(154): n includes a, c, g, or t, or contains no nucleotide
  misc_feature (162)..(162): n includes a, c, g, or t, or contains no nucleotide
  misc_feature (169)..(169): n includes a, c, g, or t, or contains no nucleotide
  misc_feature (177)..(177): n includes a, c, g, or t, or contains no nucleotide
  misc_feature (187)..(187): n includes a, c, g, or t, or contains no nucleotide
  misc_feature (193)..(193): n includes a, c, g, or t, or contains no nucleotide
  misc_feature (201)..(201): n includes a, c, g, or t, or contains no nucleotide
  misc_feature (206)..(206): n includes a, c, g, or t, or contains no nucleotide
  misc_feature (211)..(211): n includes a, c, g, or t, or contains no nucleotide
  misc_feature (218)..(218): n includes a, c, g, or t, or contains no nucleotide
  misc_feature (230)..(230): n includes a, c, g, or t, or contains no nucleotide
  misc_feature (245)..(245): n includes a, c, g, or t, or contains no nucleotide
  misc_feature (253)..(253): n includes a, c, g, or t, or contains no nucleotide
  misc_feature (269)..(269): n includes a, c, g, or t, or contains no nucleotide
  misc_feature (327)..(327): n includes a, c, g, or t, or contains no nucleotide
  misc_feature (375)..(375): n includes a, c, g, or t, or contains no nucleotide
ccccggacaggatgaatggatcaaaggagtgaggttgctaaagaacatccttttnccctctcattctacccttttcctctccccgattcnnnnnnnnnnnnnnnnnnnnntnntcttagnaggggncagttctnacctcctctgtcccntcggncagaaagnacgtttnccacaccntcttaggggnatgcgncattaaancttcnttttngcccccnttcttgtccccntttgaggggcacttnaagatggnagaaatcagttgtggntttcagtgaatcatggtcacctgtatttattgctaggagaagcctgagggtggggggnagatgatcatgtgtgctcggggttggctggaagccctgggtggggggntgggggaggactaatggggagtcggggaatatttgtgggtattttttttacttcctcttggttcccagctgtgacacgttttgatcaaa

SEQ ID NO: 4845 - DNA, 579 bp, Homo sapiens
tcctgaagccatcaactttggctccttcaccatcaagtcagacgtctggtcctttggtatcctgctgatggagatcgtcacctacggccggatcccttacccagggatgtcaaaccctgaagtgatccgagctctggagcgtggataccggatgcctcgcccagagaactgcccagaggagctctacaacatcatgatgcgctgctggaaaaaccgtccggaggagcggccgaccttcgaatacatccagagtgtgctggatgacttctacacggccacagagagccagtaccaacagcagccatgatagggaggaccagggcagggcagggggtgcccaggtggtggctgcaaggtggctccagcaccatccgccagggcccacacccccttccttcacccagacacccaccctcgcttcaggccacagtttcctcatctgtccagtgggtaggttggactggaaaatctctttttgactcttgcaatggacaatctgacattctcaggaagcccccaagttgatatttctatttcctggaatggttggattttagttacagctgtgatttggaaggg

SEQ ID NO: 4846 - DNA, 469 bp, Homo sapiens
  misc_feature (320)..(338): n includes a, c, g, or t, or contains no nucleotide
  misc_feature (438)..(438): n includes a, c, g, or t, or contains no nucleotide
cattctaatgcatgtattcgggttaggggaatggagggaatgctcagaaaggaaataattttatgctggactctggaccatataccatctccagctatttacacacacctttctttagcatgctacagttattaatctggacattcgaggaattggccgctgtcactgcttgttgtttgcgcatttttttttaaagcatattggtgctagaaaaggcagctaaaggaagtgaatctgtattggggtacaggaatgaaccttctgcaacatcttaagatccacaaatgaagggatataaaaataatgtcataggtaagaannnnnnnnnnnnnnnnnnnaccatataaatgtggaggctatcaacaaagaatgggcttgaaacattataaaaattgacaatgatttattaaatatgttttctcaattgtaaaaaaaaanaaatctcctgtgtaatcaaggccagtgctaa

SEQ ID NO: 4847 - DNA, 385 bp, Homo sapiens
aacatctgtgatctttctacagcagcttcagttttgtgccaacattccatgtattttgaatatgagcaaaaactgatcttaagagcagacttaaagtagctttgtacgccttaatgttcattttgatttattttaaatctttacattcagaaatgagatactgtattatcagaccaggaggcattgctgtgaaagataatttcctattctaaaatatcaaatttaaaataaagataatgaaagaaaacataagagaactattggactctaattgctttgaactagttttgcagtttgactttacgtcttatacatcttagttacaagtctttggaaactcttgtttacttatgagcataatcattccttggagttatactaacta

SEQ ID NO: 4848 - DNA, 412 bp, Homo sapiens
  misc_feature (97)..(97): n includes a, c, g, or t, or contains no nucleotide
  misc_feature (100)..(100): n includes a, c, g, or t, or contains no nucleotide
  misc_feature (106)..(106): n includes a, c, g, or t, or contains no nucleotide
  misc_feature (140)..(163): n includes a, c, g, or t, or contains no nucleotide
  misc_feature (218)..(218): n includes a, c, g, or t, or contains no nucleotide
  misc_feature (250)..(278): n includes a, c, g, or t, or contains no nucleotide
acagttgtggttagccgtatcattgtgtgggacatcatggccttcaatggcatcatccatgctctggccagccccctcctggcacccccacagcccnagncagtgntggcgcctgaagccccacctgtggcggcaggcgnnnnnnnnnnnnnnnnnnnnnnnncactgcttggcttggtggccggagctctctacctccgtgcccgaggcaagcccangggctttggcttctctgccttccaggcggaannnnnnnnnnnnnnnnnnnnnnnnnnnnngcaagaagggaccaaccccaccctggtctctgtccccaaccctgtctttggcagcgacaccttttgtgaacccttcgatgactcactgctggaggaggacttccctgacacccagaggatcctcacagtcaagt

SEQ ID NO: 4849 - DNA, 508 bp, Homo sapiens
  misc_feature (51)..(70): n includes a, c, g, or t, or contains no nucleotide
  misc_feature (94)..(94): n includes a, c, g, or t, or contains no nucleotide
  misc_feature (166)..(199): n includes a, c, g, or t, or contains no nucleotide
ccactgagcctgtgcagggtacttgggagaaaggccctgtttccctggaannnnnnnnnnnnnnnnnnnncccctgatcccccaccccttgccntctggccaccctgtcctccccccaccaccctcaggcctatgaaacacacagggttctagatttgaactctgnnnnnnnnnnnnnnnnnnnnnnnnnnnnnnnnnnctgggggccagtgggggaggttgtttccactaggagatttttataaaccctctccagcctctcccaaaggaagcgttggcagcaaagggagatgatgcccttacccaccttcctgtgagtgaagagaggaagcagccccagggaccaattttcccaattgacctctttcttcctctttcaccatgtgaggcagggagccctgagcccttcagctgcctgcacaacccctgacattggctgctggtgactcaatctgccaaatgtgctgcagctcgttttctcccaattacagcaagactgtcagcctca

SEQ ID NO: 4850 - DNA, 564 bp, Homo sapiens
  misc_feature (93)..(94): n includes a, c, g, or t, or contains no nucleotide
  misc_feature (97)..(118): n includes a, c, g, or t, or contains no nucleotide
  misc_feature (328)..(328): n includes a, c, g, or t, or contains no nucleotide
  misc_feature (331)..(331): n includes a, c, g, or t, or contains no nucleotide
  misc_feature (368)..(368): n includes a, c, g, or t, or contains no nucleotide
  misc_feature (373)..(373): n includes a, c, g, or t, or contains no nucleotide
ggagctccctggacctgtcctattatcctacttcctcctccacctcttttatgtcctcctcatcatcttcctcttcatggctcacccgccgtnncannnnnnnnnnnnnnnnnnnnnntggggctgggctgggccaggatcgccaggtcccgctctggggccagctgctgcttttcctggtctttgtgatcgtcctcttcttcatttaccacttcatgcaggctgaagaaggcaaccccttctagagggagccatgagggtctgggcttcagagctaggtctttggggaagtcctggctgactgccttagcagtgggggtgggggtgnggncaggggcaggggctttatgtgtttttgcttggggggncgctnggcctagcccagagtagtgcttgctccccctgccttgtcccaccagggaggcagcagactcaggccctccatggtcctctttgtcattttgttgacatgcattcctccttttgtcatcttgttggggggaggggattaaccaaaggccaccctgactttgtttttgtggacacacaataaaagccccgttt

SEQ ID NO: 4851 - DNA, 538 bp, Homo sapiens
  misc_feature (294)..(294): n includes a, c, g, or t, or contains no nucleotide
  misc_feature (296)..(296): n includes a, c, g, or t, or contains no nucleotide
  misc_feature (299)..(303): n includes a, c, g, or t, or contains no nucleotide
  misc_feature (509)..(510): n includes a, c, g, or t, or contains no nucleotide
cttgtagtgagcagtgtatggtctcttttgttcagaatttaaaactgataaccaatgaaagccttttctcttattcctctaccgtcatttacatgataatctgaagctaatatgacaatatttaaatactaagtggtactagggaactacaagaatactgtaaagcttaagccattgttatcactgtcatttagcatttaataacaaaactatacagaattatgtgcataccaatgaatgttttgtaccatctagttaaattttttaaataaagttttatgggttaagcagaananaannnnnatactgaattttattaaaagtatatatacttcaaattcaaagcatcccttaggacccacagaatatattaaaactaccacccttaaattttatatttttgctttaagacagacaatgcaaaggtaactggcaagaggtgagcaaatgttttagaacatttatattattgcttaaaatgagatttgaaattgtaataaaattcttgnntatgaagtctgatgtcttctctgagcac

SEQ ID NO: 4852 - DNA, 552 bp, Homo sapiens
  misc_feature (76)..(76): n includes a, c, g, or t, or contains no nucleotide
  misc_feature (140)..(140): n includes a, c, g, or t, or contains no nucleotide
  misc_feature (142)..(143): n includes a, c, g, or t, or contains no nucleotide
  misc_feature (333)..(333): n includes a, c, g, or t, or contains no nucleotide
  misc_feature (404)..(405): n includes a, c, g, or t, or contains no nucleotide
  misc_feature (425)..(426): n includes a, c, g, or t, or contains no nucleotide
  misc_feature (428)..(428): n includes a, c, g, or t, or contains no nucleotide
  misc_feature (430)..(431): n includes a, c, g, or t, or contains no nucleotide
  misc_feature (433)..(436): n includes a, c, g, or t, or contains no nucleotide
  misc_feature (438)..(440): n includes a, c, g, or t, or contains no nucleotide
  misc_feature (442)..(448): n includes a, c, g, or t, or contains no nucleotide
  misc_feature (450)..(451): n includes a, c, g, or t, or contains no nucleotide
  misc_feature (453)..(454): n includes a, c, g, or t, or contains no nucleotide
  misc_feature (467)..(467): n includes a, c, g, or t, or contains no nucleotide
  misc_feature (486)..(487): n includes a, c, g, or t, or contains no nucleotide
tcagtgttgcgctgccgcagccgctgctccagcacgtgcagtgaaggcggctgcacagagatgtagatgggccgcnagatcggtggccttgatgttccgcacaccctgcaggtccacgtccagcacacagatgcggttcnanngcctgcacggcctgcaccgccaccttgctcgtgccatacaggttccccgagaactcggcatgctcgatgaagtcgccggctgctatgtcacgctgcatcacctccctggttacaaagtagtaatctttgccgttctcctcgccgggcctcgggttcctcgtggtatgggacacgctgaagccaaagatgncgctgtgctcctggagcagcctcttcagcagggtgctcttcccagctcccgaaggcccgctcagcaccacnngcctggggcccgacatgccnncngnngnnnncnnncnnnnnnngnncnncagaggagtgaangccccagcccttcacgatnntgcgcggctatgtttgggtctgtccatcagggagaaagaaaaaccggccgagtcttgcacagggt

SEQ ID NO: 4853 - DNA, 53 bp, Homo sapiens
tatttggttcccttcctattccaagcttccatagctgctgccctagttttctt

SEQ ID NO: 4854 - DNA, 500 bp, Homo sapiens
  misc_feature (35)..(37): n includes a, c, g, or t, or contains no nucleotide
  misc_feature (176)..(176): n includes a, c, g, or t, or contains no nucleotide
  misc_feature (189)..(189): n includes a, c, g, or t, or contains no nucleotide
  misc_feature (295)..(324): n includes a, c, g, or t, or contains no nucleotide
ttgcagagtggttgcggccagcacccgggagatgnnnatgctcatagctcaggccttacagacgattaactatgggcgggatgatgagaagtgactgcggctgaggcaaagctgctcccaaggcctccctgggctgctgtgggctcctggggaggtggccctcgtggcccacgctnccatgccagtggntcacgctctgctcctggctaccccagagggagttgtcacgctacagtgagtggctggccttttaaatcgacgtctctctcaccaggatttggtgtttagctgtttnnnnnnnnnnnnnnnnnnnnnnnnnnnnnngttagtacgtgttcttctgtcagggccaaaactcaaatctcctgtgaaatacgtattgataatccaatcttgatttttccccccagaatataaatctcaggtaataaggctttagaactgctgataaagcggatcgttctcaggccctccccccggagtacttcagaatgcaataa

SEQ ID NO: 4855 - DNA, 566 bp, Homo sapiens
  misc_feature (123)..(123): n includes a, c, g, or t, or contains no nucleotide
  misc_feature (158)..(158): n includes a, c, g, or t, or contains no nucleotide
gcaccagtcatctctgcagaaaaggcataccacgagcagctgtcggtggcagagatcaccaatgcctgctttgagcctgccaaccagatggtaaagtgtgatccccggcacggcaagtacatnggcctgctgcctgctgtaccgtggagatgtggtgncccaaggatgtcaacgctgccattgccgccatcaagaccaagcgcagcattcagtttgtggactggtgccccacaggcttcaaggttggtatcaactaccagcctcccactgtggtgcctgggggtgacctggccaaggtgcagcgtgccgtgtgcatgctgagcaacacgaccgccatcgccgaggcctgggcccgcctggaccacaagttcgacctgatgtatgccaagagggcgtttgtgcactggtatgtgggtgagggcatggaggagggtgagttctccgaggcccgtgaggatatggctgccctggagaaggattatgaggaggtgggcatcgactcctatgaggacgaggatgagggagaagaataaagcagctgcctggagcctattcactatgtttat

SEQ ID NO: 4856 - DNA, 574 bp, Homo sapiens
  misc_feature (198)..(214): n includes a, c, g, or t, or contains no nucleotide
  misc_feature (225)..(549): n includes a, c, g, or t, or contains no nucleotide
tttttgacttctgcctataccctggggtaagtggagttgggaaatacaagaagagaaagaccagtggggatttgtaagacttagatgagatagcgcataataaggggaagactttaaagtataaagtaaaatgtttgctgtaggttttttatagctattaaaaaaaatcagattatggaagttttcttctatttttannnnnnnnnnnnnnnnntgtttcttttnnnnnnnnnnnnnnnnnnnnnnnnnnnnnnnnnnnnnnnnnnnnnnnnnnnnnnnnnnnnnnnnnnnnnnnnnnnnnnnnnnnnnnnnnnnnnnnnnnnnnnnnnnnnnnnnnnnnnnnnnnnnnnnnnnnnnnnnnnnnnnnnnnnnnnnnnnnnnnnnnnnnnnnnnnnnnnnnnnnnnnnnnnnnnnnnnnnnnnnnnnnnnnnnnnnnnnnnnnnnnnnnnnnnnnnnnnnnnnnnnnnnnnnnnnnnnnnnnnnnnnnnnnnnnnnnnnnnnnnnnnnnnnnnnnnnnnnnnnnnnnnnnnnnnnnnnnnnnnnnnnnnntaattcctctgattctgttttctgg

SEQ ID NO: 4857 - DNA, 348 bp, Homo sapiens
  misc_feature (38)..(38): n includes a, c, g, or t, or contains no nucleotide
  misc_feature (58)..(73): n includes a, c, g, or t, or contains no nucleotide
  misc_feature (316)..(317): n includes a, c, g, or t, or contains no nucleotide
cgtgtccatgagtggcatcggcgccctcatcttcaggnttctcatggacatgtccccnnnnnnnnnnnnnnnnagagccctgggactcttcactgtcctggacggccttgctttcctcatctccccaccactggccgggttgctcctggacgccaccaacaactttagctatgttttctacatgtccagcttcttcctcatctcagctgccctcttcatgggtggcagcttctacgccctgcagaagaaggagcaaggcaagcaggctgtcgcggcggatgccctggagcgggatcttttcttggaagccaaagannggtcctgggaagcaacggtcccctgagatca

SEQ ID NO: 4858 - DNA, 501 bp, Homo sapiens
  misc_feature (35)..(35): n includes a, c, g, or t, or contains no nucleotide
  misc_feature (52)..(54): n includes a, c, g, or t, or contains no nucleotide
  misc_feature (58)..(58): n includes a, c, g, or t, or contains no nucleotide
  misc_feature (62)..(62): n includes a, c, g, or t, or contains no nucleotide
  misc_feature (89)..(89): n includes a, c, g, or t, or contains no nucleotide
  misc_feature (93)..(93): n includes a, c, g, or t, or contains no nucleotide
tgaagtgtttcacgagagcccgggagctgctgccntgcggccccgtctgtgnnntttnagcntctgggtctgagtcatggccgggtggngcgncacagccttctccactggccggagtcagtgccaggtccttgccctttgtggaaagtcacaggtcacacgaggggccccgtgtcctgcctgtctgaagccaatgctgtctggttgcgccatttttgtgcttttatgtttaattttatgagggccacgggtctgtgttcgactcagcctcagggacgactctgacctcttggccacagaggactcacttgcccacaccgagggcgaccccgtcacagcctcaagtcactcccaagccccctccttgtctgtgcatccgggggcagctctggagggggtttgctggggaactggcgccatcgccgggactccagaaccgcagaagcctccccagctcacccctggaggacggccggctctctatagcaccagggctcacgt

SEQ ID NO: 4859 - DNA, 117 bp, Homo sapiens
tgggagaacctcaggcttccttggcatcacagggcagagccgggaagcgatgaatttggagactctgtggggccttggttcccttgtgtgtgtgtgttgatcccaagacaatgaaag

SEQ ID NO: 4860 - DNA, 227 bp, Homo sapiens
gcagcctgacctcttcaaagatatcatcaacatgctattttatcatgacaggtttaaagtctttgcagactacgaagcctatgtcaagtgtcaagataaagtgagtcagctgtacatgaatccaaaggcctggaacacaatggtactcaaaaacatagctgcctcggggaaattctccagtgaccgaacaattaaagaatatgcccaaaacatctggaacgtggaac

SEQ ID NO: 4861 - DNA, 498 bp, Homo sapiens
  misc_feature (115)..(115): n includes a, c, g, or t, or contains no nucleotide
  misc_feature (147)..(161): n includes a, c, g, or t, or contains no nucleotide
  misc_feature (178)..(197): n includes a, c, g, or t, or contains no nucleotide
  misc_feature (240)..(240): n includes a, c, g, or t, or contains no nucleotide
  misc_feature (348)..(348): n includes a, c, g, or t, or contains no nucleotide
  misc_feature (357)..(357): n includes a, c, g, or t, or contains no nucleotide
  misc_feature (371)..(371): n includes a, c, g, or t, or contains no nucleotide
  misc_feature (376)..(376): n includes a, c, g, or t, or contains no nucleotide
  misc_feature (378)..(379): n includes a, c, g, or t, or contains no nucleotide
  misc_feature (381)..(384): n includes a, c, g, or t, or contains no nucleotide
  misc_feature (386)..(387): n includes a, c, g, or t, or contains no nucleotide
  misc_feature (389)..(391): n includes a, c, g, or t, or contains no nucleotide
  misc_feature (393)..(397): n includes a, c, g, or t, or contains no nucleotide
  misc_feature (399)..(403): n includes a, c, g, or t, or contains no nucleotide
  misc_feature (405)..(410): n includes a, c, g, or t, or contains no nucleotide
  misc_feature (412)..(412): n includes a, c, g, or t, or contains no nucleotide
  misc_feature (414)..(420): n includes a, c, g, or t, or contains no nucleotide
  misc_feature (422)..(469): n includes a, c, g, or t, or contains no nucleotide
ctgcttcacttgtggcaagatcgtcggcaacaagtgggaggcttacctggggctgctgcaggccgagtacaccgagggggacgcgctggatgccctgggcctgaagcgctactgntgccgccggatgctgctggcccacgtggaccnnnnnnnnnnnnnnntcaattatgcacccctnnnnnnnnnnnnnnnnnnnnacccacccacccgctgtgctgaccatgggccctgagcgtcctnccccgaattcacgaggctgaggcatccgggagctggcgtaatgcctggccgcagtgtgtgtgtatcccataccccactctggaaggaaccatccagtaaaggtctttncagaaccanaaaaaaaaaaaaanaaaanannannnnannannnannnnnannnnnannnnnnanannnnnnnannnnnnnnnnnnnnnnnnnnnnnnnnnnnnnnnnnnnnnnnnnnnnnngcctggtttcaaagggacccctgcaggag

SEQ ID NO: 4862 - DNA, 325 bp, Homo sapiens
ttcactgaccttggactttggcatgattcttagtcatacttgaacttgtctcattccacctcttctcagagcaactcttcctttgggaaaagagttcttcagatcatagaccaaaaaagtcataccttcgaggtggtagcagtagattccaggaggagaagggtacttgctaggtatcctgggtcagtggcggtgcaaactggtttcctcagctgcctgtccttctgtgtgcttatgtctcttgtgacaattgttttcctccctgcccctggaggttgtcttcaactgtggacttctgggatttgcagattttgcaacgtggtac

SEQ ID NO: 4863 - DNA, 371 bp, Homo sapiens
tgaactcttcgagtccatccgtgtggacacgccacattatccccgctggatcaccaaggagtccaaggacatcctggagaagctctttgaaagggaaccaaccaagaggctgggagtgacgggaaacatcaaaatccaccccttcttcaagaccataaactggactctgctggaaaagcggaggttggagccacccttcaggcccaaagtgaagtcacccagagactacagtaactttgaccaggagttcctgaacgagaaggcgcgcctctcctacagcgacaagaacctcatcgactccatggaccagtctgcattcgctggcttctcctttgtgaaccccaaattcgagcacctcctggaagattgag

SEQ ID NO: 4864 - DNA, 596 bp, Homo sapiens
  misc_feature (357)..(357): n includes a, c, g, or t, or contains no nucleotide
  misc_feature (359)..(361): n includes a, c, g, or t, or contains no nucleotide
  misc_feature (365)..(365): n includes a, c, g, or t, or contains no nucleotide
  misc_feature (368)..(369): n includes a, c, g, or t, or contains no nucleotide
  misc_feature (385)..(391): n includes a, c, g, or t, or contains no nucleotide
  misc_feature (394)..(394): n includes a, c, g, or t, or contains no nucleotide
  misc_feature (398)..(399): n includes a, c, g, or t, or contains no nucleotide
  misc_feature (403)..(403): n includes a, c, g, or t, or contains no nucleotide
  misc_feature (536)..(536): n includes a, c, g, or t, or contains no nucleotide
ctgtcttctgggagttatcaattttaaagagaacttttgtgcaattcaaatgaagtttttataagtaattgaaaatgacaacacaataacactttctgtataaaagtatatattttatgtgatttattcctactaaatgaaagtgcactactgcctcatgtaaagactcttgcacgcagagcctttaagtgactaaggaacaacatagatagtgagcatagtccccacctccacccctcacaatttatttgaatacttcaattgtgcctctcaattttttgtaatgctaaaaaatcagtatctagatggtttttaaatgtattctctggaaattgttttatgtaaaataaatgttantnnnattncannaaaaaaaaaaaaaaannnnnnnaanaaannaaantcatttagtggggtagggggaaggattattgggtcggggtttgttagggagaggaatacatttcttgctgtactgggttaaagtataggagcaaggctgctgttaaggggaaaatataccaaaaccccggggngtccttaaaaccaggggggtagggaggttttgttttttcctccaaattcagctccacggg

SEQ ID NO: 4865 - DNA, 265 bp, Homo sapiens
atacctgttgtgagacccgaggggcggcggcgcggttttttatggtgacacaaatgtatattttgctaacagcaattccaggctcagtattgtgaccgcggagccacaggggaccccacgcacattccgttgccttacccgatggcttgtgacgcggagagaaccgattaaaaccgtttgagaaactcctcccttgtctagccctgtgttcgctgtggacgctgtagaggcaggttggccagtctgtacctggacttcgaataaa

SEQ ID NO: 4866 - DNA, 91 bp, Homo sapiens
gactgtgaggactgtggataacctgctggaggtgtctgcccggcacccccagcgcctggaccgccacggcttcgtgtcccgagagttctgc

SEQ ID NO: 4867 - DNA, 548 bp, Homo sapiens
  misc_feature (126)..(150): n includes a, c, g, or t, or contains no nucleotide
  misc_feature (152)..(152): n includes a, c, g, or t, or contains no nucleotide
  misc_feature (159)..(159): n includes a, c, g, or t, or contains no nucleotide
  misc_feature (165)..(165): n includes a, c, g, or t, or contains no nucleotide
gccgccaatacaaagggtatctgcttcatccggaccagccgcccagaaaatgccatcatctataacaacaatgaggacttccaggtcggacaagccaaggtggtcctgaagagcaaggatgaccannnnnnnnnnnnnnnnnnnnnnnnnanccctgcnacgagnccttggccgctgccgaactgctgaagaaagaaaagatcaacatccgcgtgctggaccccttcaccatcaagcccctggacagaaaactcattctcgacagcgctcgtgccaccaagggcaggatcctcaccgtggaggaccattattatgaaggtggcattggtgaggctgtgtccagtgcagtagtgggcgagcctggcatcactgtcacccacctggcagttaaccgggtaccaagaagtgggaagccggctgagctgctgaagatgtttggtatcgacagggatgccattgcacaagctgtgaggggcctcatcaccaaggcctagggcgggtatgaagtgtggggcgggggtctatacattcctgagattctgggaaag

SEQ ID NO: 4868 - DNA, 162 bp, Homo sapiens
  misc_feature (98)..(113): n includes a, c, g, or t, or contains no nucleotide
accctccggagctgcaacttcggttcctgcggaatgggctggccgctggcaccggccagggtgacttcggccccaacagtgacggatccttccacgcnnnnnnnnnnnnnnnngtcaaaagtggcgatgagcaccactactgctgcattgtgcagcacgcgg

SEQ ID NO: 4869 - DNA, 89 bp, Homo sapiens
caagttgctgggtaaagtcacaattgctcagggcggtgttctgcccaacatccaggctgtactgctccccaagaagactgagagtcacc

SEQ ID NO: 4870 - DNA, 549 bp, Homo sapiens
  misc_feature (44)..(44): n includes a, c, g, or t, or contains no nucleotide
  misc_feature (74)..(74): n includes a, c, g, or t, or contains no nucleotide
  misc_feature (85)..(85): n includes a, c, g, or t, or contains no nucleotide
  misc_feature (97)..(97): n includes a, c, g, or t, or contains no nucleotide
  misc_feature (105)..(105): n includes a, c, g, or t, or contains no nucleotide
  misc_feature (114)..(114): n includes a, c, g, or t, or contains no nucleotide
  misc_feature (128)..(128): n includes a, c, g, or t, or contains no nucleotide
  misc_feature (136)..(136): n includes a, c, g, or t, or contains no nucleotide
  misc_feature (140)..(140): n includes a, c, g, or t, or contains no nucleotide
  misc_feature (147)..(150): n includes a, c, g, or t, or contains no nucleotide
  misc_feature (156)..(156): n includes a, c, g, or t, or contains no nucleotide
  misc_feature (164)..(164): n includes a, c, g, or t, or contains no nucleotide
  misc_feature (169)..(170): n includes a, c, g, or t, or contains no nucleotide
  misc_feature (175)..(175): n includes a, c, g, or t, or contains no nucleotide
  misc_feature (183)..(184): n includes a, c, g, or t, or contains no nucleotide
  misc_feature (191)..(192): n includes a, c, g, or t, or contains no nucleotide
  misc_feature (198)..(198): n includes a, c, g, or t, or contains no nucleotide
  misc_feature (203)..(203): n includes a, c, g, or t, or contains no nucleotide
  misc_feature (212)..(212): n includes a, c, g, or t, or contains no nucleotide
  misc_feature (217)..(217): n includes a, c, g, or t, or contains no nucleotide
  misc_feature (219)..(219): n includes a, c, g, or t, or contains no nucleotide
  misc_feature (223)..(223): n includes a, c, g, or t, or contains no nucleotide
  misc_feature (226)..(226): n includes a, c, g, or t, or contains no nucleotide
  misc_feature (230)..(230): n includes a, c, g, or t, or contains no nucleotide
  misc_feature (235)..(235): n includes a, c, g, or t, or contains no nucleotide
  misc_feature (240)..(240): n includes a, c, g, or t, or contains no nucleotide
  misc_feature (247)..(247): n includes a, c, g, or t, or contains no nucleotide
  misc_feature (251)..(251): n includes a, c, g, or t, or contains no nucleotide
  misc_feature (261)..(261): n includes a, c, g, or t, or contains no nucleotide
  misc_feature (267)..(267): n includes a, c, g, or t, or contains no nucleotide
  misc_feature (286)..(286): n includes a, c, g, or t, or contains no nucleotide
  misc_feature (289)..(289): n includes a, c, g, or t, or contains no nucleotide
  misc_feature (295)..(297): n includes a, c, g, or t, or contains no nucleotide
  misc_feature (303)..(304): n includes a, c, g, or t, or contains no nucleotide
  misc_feature (308)..(309): n includes a, c, g, or t, or contains no nucleotide
  misc_feature (311)..(311): n includes a, c, g, or t, or contains no nucleotide
  misc_feature (315)..(315): n includes a, c, g, or t, or contains no nucleotide
  misc_feature (319)..(319): n includes a, c, g, or t, or contains no nucleotide
  misc_feature (324)..(324): n includes a, c, g, or t, or contains no nucleotide
  misc_feature (329)..(329): n includes a, c, g, or t, or contains no nucleotide
  misc_feature (331)..(332): n includes a, c, g, or t, or contains no nucleotide
  misc_feature (335)..(335): n includes a, c, g, or t, or contains no nucleotide
  misc_feature (337)..(337): n includes a, c, g, or t, or contains no nucleotide
  misc_feature (342)..(343): n includes a, c, g, or t, or contains no nucleotide
  misc_feature (349)..(349): n includes a, c, g, or t, or contains no nucleotide
  misc_feature (354)..(354): n includes a, c, g, or t, or contains no nucleotide
  misc_feature (356)..(356): n includes a, c, g, or t, or contains no nucleotide
  misc_feature (363)..(363): n includes a, c, g, or t, or contains no nucleotide
  misc_feature (385)..(386): n includes a, c, g, or t, or contains no nucleotide
  misc_feature (390)..(390): n includes a, c, g, or t, or contains no nucleotide
  misc_feature (395)..(395): n includes a, c, g, or t, or contains no nucleotide
  misc_feature (398)..(398): n includes a, c, g, or t, or contains no nucleotide
  misc_feature (405)..(405): n includes a, c, g, or t, or contains no nucleotide
  misc_feature (410)..(410): n includes a, c, g, or t, or contains no nucleotide
  misc_feature (414)..(414): n includes a, c, g, or t, or contains no nucleotide
  misc_feature (419)..(457): n includes a, c, g, or t, or contains no nucleotide
gcttcccagtacttgcatggggttcactatttatagttttcttngggagtatcacaggaaaatcacaattacanccactttaganccctatgtgtangcaggtcnacaacttancccttgtgtgtttnagatgtgntatngaaatannnncctgtnatacgttnagtgnnaaagnctgtttannctgtaanncggggnaaaancccagattnctttngncatnctngggnccccntctanctgattngttnaaaggagttnccctgntcaccctgctccccccacncancccccnnngcatgnncgtnncntgtncccnacttnggccntnnaancnttttnnaatatngtgtnantttttancattatgtatattccttaactnngganctgtnctncgtttangactngtantacannnnnnnnnnnnnnnnnnnnnnnnnnnnnnnnnnnnnnncagtaagattcctgtaagaaatactgctttttaagaaaaaaaataacatgctgaggggtgacctatatcccatgtgagtggtcactttattt

SEQ ID NO: 4871 - DNA, 295 bp, Homo sapiens
aatcgtcatcggtgtcttgctactcacggcagcggctgtaggaggagctctgttgtggagaaggatgaggagtgggctgccagccccttggatctcccttcgtggagacgacaccggggtcctcctgcccaccccaggggaggcccaggatgctgatttgaaggatgtaaatgtgattccagccaccgcctgaccatccgccattccgactgctaaaagcgaatgtagtcaggcccctttcatgctgtgagacctcctggaacactggcatctctgagcctccagaaggggttct

SEQ ID NO: 4872 - DNA, 537 bp, Homo sapiens
  misc_feature (76)..(95): n includes a, c, g, or t, or contains no nucleotide
  misc_feature (306)..(331): n includes a, c, g, or t, or contains no nucleotide
agtctcagagactatttagacaaagttcaagttaggagcttttaggatgtgggagtaaaactttaatgggaggggnnnnnnnnnnnnnnnnnnnnggaagaagccagactggttagacagtactcttaactcctagcccagcctagcgtgccctgcccctctggccactgctgcagacacctgccttaacacacacacctctaggactccacagttttgccttaaaggaccttcccaagtctccctttccctgtctggcttctcccttaagaagagagagatacttgtagaattgggtggggggannnnnnnnnnnnnnnnnnnnnnnnnnggatatgttacattagagtgagagagagaataaggagcctttcttatggaagaaatgggagaagagagacagggttcttttcagcagagtctagtagtttctctgtaaggcaaaataatctaaaaagactaacctgcccacccactccttatattgctgtgagattgcccctatcttgtgctcttctgtctgcagtgtgcacggcc

SEQ ID NO: 4873 - DNA, 299 bp, Homo sapiens
  misc_feature (133)..(133): n includes a, c, g, or t, or contains no nucleotide
  misc_feature (251)..(251): n includes a, c, g, or t, or contains no nucleotide
tattcacttctcatgcacccggatgctctggaagagcctgatgaccagaaccgtatttagtctccattgtcttgcattgggatttgagaagaaaatcagagagggaagatctggtatttcctggcctaaattnccccttggggaggacagggagatgctgcagttccaaaagagaaggtttcttccagagtcatctacctgagtcctgaagctccctgtcctgaaagccacagacaatatggtcccaaatnaccgactgcaccttctgtgcttcagctcttcttgacatcaaggctctt

SEQ ID NO: 4874 - DNA, 337 bp, Homo sapiens
  misc_feature (156)..(182): n includes a, c, g, or t, or contains no nucleotide
aagttcaagctcaacaagtcagaactaaaggagctgctgacccgggagctgcccagcttcttggggaaaaggacagatgaagctgctttccagaagctgatgagcaacttggacagcaacagggacaacgaggtggacttccaagagtactgtgtnnnnnnnnnnnnnnnnnnnnnnnnnnntaacgaattctttgaaggcttcccagataagcagcccaggaagaaatgaaaactcctctgatgtggttggggggtctgccagctggggccctccctgtcgccagtgggcacttttttttttccaccctggctccttcagacacgtgcttgatgct

SEQ ID NO: 4875 - DNA, 152 bp, Homo sapiens
ttaggacataacagactaggccagacatagcatcttgtggctttgcaaccattttcatttgtttgttttccttttatttcttcaccagatttaaataactggaggaattttctccaatttttttttccttctctggcaggtatccccagcag

SEQ ID NO: 4876 - DNA, 473 bp, Homo sapiens
  misc_feature (200)..(200): n includes a, c, g, or t, or contains no nucleotide
agggaggttccattcaccgtcttctgggttagcgcttgattggatgtttcaagcaagggacaaggtgatggtggctgtaataggctcctcgtgggcaccgtcaccccagaaggcctgggcacccatgagaacctgtggccagcccttttcattggctgagttccctgctgttgtgcgtggtgccattttttttttaaacnacatatataaaaacaaaacaactggttctgtgtgtatcaacttaatttgcatatgaatgagtgttgtgttgtgatttgcagtgttttgacaccgtgattggctttgtttgggtctctcttctttctgtgaaattaactgctgtgcgttttcactgttcttagagaagaccctgagctcctgggggttttcttgtctcacttctaccctgacctgctggggagcccaccccaccccagtccagccatggaggggtatttccagcctattccaat

SEQ ID NO: 4877 - DNA, 510 bp, Homo sapiens
  misc_feature (26)..(26): n includes a, c, g, or t, or contains no nucleotide
  misc_feature (116)..(167): n includes a, c, g, or t, or contains no nucleotide
  misc_feature (170)..(174): n includes a, c, g, or t, or contains no nucleotide
  misc_feature (177)..(177): n includes a, c, g, or t, or contains no nucleotide
  misc_feature (186)..(186): n includes a, c, g, or t, or contains no nucleotide
  misc_feature (330)..(345): n includes a, c, g, or t, or contains no nucleotide
  misc_feature (350)..(364): n includes a, c, g, or t, or contains no nucleotide
  misc_feature (435)..(451): n includes a, c, g, or t, or contains no nucleotide
ggcagccctcctacttttgggggatnccctgggtttggaggggtgccagcattcggttcagccccagcctttacaagccctctgggctcgacgggaggcaaagtgttcggagaggnnnnnnnnnnnnnnnnnnnnnnnnnnnnnnnnnnnnnnnnnnnnnnnnnnnncannnnnttnggcacgctngcgagtcagaatgcccccactttcggatcactgtcccaacagacttctggttttgggacccagagtagcggattctctggttttggatcaggcacaggagggttcagctttgggtcaaataactcgtctgtccagggttttggnnnnnnnnnnnnnnnngggcnnnnnnnnnnnnnnntcgatccctgggaccaaccgcatcctcagcttcttccccgagaaatgctggagcaggctgttcagaccgannnnnnnnnnnnnnnnnatacacccagaaagaaacaacagaaaccaaaactcacaaggcgcatgattacttgtttt

SEQ ID NO: 4878 - DNA, 295 bp, Homo sapiens
gaagggctcctgcaggccacagccacctaaacggttcagtttcttctgcgcctcaggctgctggggcctcagacgagacccaagggcagagcatttaagagtgaagtcatgacctccagggagcctagaagctggtggcccttgcccggcctgtgctcagagacctgaagtgtgcacgttgcttcaggcatggggggtggggggagcgtcccaaatcaataagaaggtagaatgagttatgagttattcatattctgttggaagcttgttttccagtctcttgtacagcgtttta

SEQ ID NO: 4879 - DNA, 504 bp, Homo sapiens
  misc_feature (40)..(54): n includes a, c, g, or t, or contains no nucleotide
  misc_feature (140)..(140): n includes a, c, g, or t, or contains no nucleotide
  misc_feature (163)..(163): n includes a, c, g, or t, or contains no nucleotide
  misc_feature (186)..(186): n includes a, c, g, or t, or contains no nucleotide
  misc_feature (218)..(218): n includes a, c, g, or t, or contains no nucleotide
  misc_feature (253)..(253): n includes a, c, g, or t, or contains no nucleotide
  misc_feature (263)..(263): n includes a, c, g, or t, or contains no nucleotide
  misc_feature (286)..(286): n includes a, c, g, or t, or contains no nucleotide
tcagtttagcataacctcttatggattttcatcaaattcnnnnnnnnnnnnnnnggaaagagccttttccttctccttttcttactctcccctcatggtgttcccctcttaaaggagaggagcttttaatttacacttanccacctcatttgcttttctgganggccatgcaatataggcgggacntacagagttaatctcctttttacaaatgaggnccaagagaagcctcattggttcacagtcatgcagnctcatactgntccacccttgtattctcagatgncaggacaattgcattttagttttattttgtggaggtgcagaatatttactctttctgtccaacccttgattctgccgaggaagacactgatggtttgatgagtgattcagctgtttttggctaagggcttttggagctgatggcaggggtttgatgaatccaaatgagctctagacattatcacagactgaatagatcttaactgtctcctacatgtg

SEQ ID NO: 4880 - DNA, 390 bp, Homo sapiens
  misc_feature (308)..(310): n includes a, c, g, or t, or contains no nucleotide
caatcagatctttatgagagcagtattttctgtgttttctttttaatttacagcctttcttattttgatatttttttaatgttgtggatgaatgccagctttcagacagagcccacttagcttgtccacatggatctcaatgccaatcctccattcttcctctccagatatttttgggagtgacaaacattctctcatcctacttagcctacctagatttctcatgacgagttaatgcatgtccgtggttgggtgcacctgtagttctgtttattggtcagtggaaatgaaaaaaaaaaaaaaaaaannngtctgcgttcattgcagttccagtttctcttccattctgtgtcacagacaccaacacaccactcattggaaaatggaaaa

SEQ ID NO: 4881 - DNA, 341 bp, Homo sapiens
  misc_feature (27)..(27): n includes a, c, g, or t, or contains no nucleotide
  misc_feature (30)..(30): n includes a, c, g, or t, or contains no nucleotide
  misc_feature (33)..(33): n includes a, c, g, or t, or contains no nucleotide
  misc_feature (36)..(36): n includes a, c, g, or t, or contains no nucleotide
  misc_feature (46)..(48): n includes a, c, g, or t, or contains no nucleotide
  misc_feature (51)..(51): n includes a, c, g, or t, or contains no nucleotide
  misc_feature (54)..(54): n includes a, c, g, or t, or contains no nucleotide
  misc_feature (57)..(57): n includes a, c, g, or t, or contains no nucleotide
  misc_feature (189)..(189): n includes a, c, g, or t, or contains no nucleotide
  misc_feature (192)..(192): n includes a, c, g, or t, or contains no nucleotide
  misc_feature (216)..(216): n includes a, c, g, or t, or contains no nucleotide
  misc_feature (219)..(219): n includes a, c, g, or t, or contains no nucleotide
  misc_feature (229)..(229): n includes a, c, g, or t, or contains no nucleotide
  misc_feature (231)..(231): n includes a, c, g, or t, or contains no nucleotide
  misc_feature (237)..(237): n includes a, c, g, or t, or contains no nucleotide
  misc_feature (282)..(282): n includes a, c, g, or t, or contains no nucleotide
  misc_feature (285)..(285): n includes a, c, g, or t, or contains no nucleotide
  misc_feature (303)..(303): n includes a, c, g, or t, or contains no nucleotide
  misc_feature (312)..(312): n includes a, c, g, or t, or contains no nucleotide
gtctacccttggacccagaggttcttngantcnttnggggatctgnnnacnccngangcagttatgggcaaccctaaggtgaaggctcatggcaagaaagtgctcggtgcctttagtgatggcctggctcacctggacaacctcaagggcacctttgccacactgagtgagctgcactgtgacaagctncangtggatcctgagaacttcaggctnctnggcaacgtgntngtctgngtgctggcccatcactttggcaaagaattcaccccaccagtgcangcngcctatcagaaagtggtngctggtgtngctaatgccctggcccacaagtatcacta

SEQ ID NO: 4882 - DNA, 320 bp, Homo sapiens
  misc_feature (90)..(90): n includes a, c, g, or t, or contains no nucleotide
tccctgtataagacactttgccaaggctctcccctctcgccccatccctgcttgcccgctcccacagcttcctgagggctaattctgggnaagggagagttctttgctgcccctgtctggaagacgtggctctgggtgaggtaggcgggaaaggatggagtgttttagttcttgggggaggccaccccaaaccccagccccaactccaggggcacctatgagatggccatgctcaacccccctcccagacaggccctccctgtctccagggcccccaccgaggttcccagggctggagacttcctctggtaaacattcct

SEQ ID NO: 4883 - DNA, 52 bp, Homo sapiens
atttctctaaagtaacacagccctccatttcgtgggggtagacagttatggt

SEQ ID NO: 4884 - DNA, 325 bp, Homo sapiens
gctgcagcagtcaccactagggggtgatggagaggaagggggccaccccagggccattaacaaccagtactccttcgtgtgagccaaccccacccgctccaccctttttaaaccccccagccctgctcgtgagattgggctgggtagggacagaggaggccgaaatccctcccccatgcttcctgacccttgttggccaagggcatctttgatggtacaagcagaggctcgggagaggctcccgtcacacactacaggtcccctccccagggcaggggatttgggctccatgagctccttgaggggctcttctggtcagccccac

SEQ ID NO: 4885 - DNA, 501 bp, Homo sapiens
  misc_feature (36)..(87): n includes a, c, g, or t, or contains no nucleotide
  misc_feature (215)..(244): n includes a, c, g, or t, or contains no nucleotide
  misc_feature (271)..(285): n includes a, c, g, or t, or contains no nucleotide
  misc_feature (335)..(335): n includes a, c, g, or t, or contains no nucleotide
  misc_feature (348)..(348): n includes a, c, g, or t, or contains no nucleotide
ctaccagtggaagatgctcaacacctcctccttgcnnnnnnnnnnnnnnnnnnnnnnnnnnnnnnnnnnnnnnnnnnnnnnnnnnnngcaaggcgaagaccagtactatctgcgggtcaccacggtggcttcccacacttctgactcggacgttccttccggtgtcactgaggtggtcgtgaagctctttgactctgatcccatcactgtgacgnnnnnnnnnnnnnnnnnnnnnnnnnnnnnnaaatttatggagaccgtggcggagaannnnnnnnnnnnnnnccgcaaaaagcaccgggaggagtgagatgtggatgttgcttttgcacctnacgggggcatctngagtccagctccccccaagatgagctgcagccccccagagagagctctgcacgtcaccaagtaaccaggccccagcctccaggcccccaactccgcccagcctctccccgctctggatcctgcactctaacactcgactctgctgctcatggg

SEQ ID NO: 4886 - DNA, 499 bp, Homo sapiens
  misc_feature (420)..(437): n includes a, c, g, or t, or contains no nucleotide
acatctgcaacacagctgtgccctgccctgtggatggggagtgggactcgtggggggagtggagcccctgtatccgacggaacatgaagtccatcagctgtcaagaaatcccgggccagcagtcacgcgggaggacctgcaggggccgcaagtttgacggacatcgatgtgccgggcaacagcaggatatccggcactgctacagcatccagcactgccccttgaaaggatcatggtcagagtggagtacctgggggctgtgcatgcccccctgtggacctaatcctacccgtgcccgccagcgcctctgcacacccttgctccccaagtacccgcccaccgtttccatggtcgaaggtcagggcgagaagaacgtgaccttctgggggagaccgctgccacggtgtgaggagctacaannnnnnnnnnnnnnnnnngaggagaaacgaccatgtctacacgtgcctgcttgcaaagaccctgaggaagaggaactcta

SEQ ID NO: 4887 - DNA, 540 bp, Homo sapiens
  misc_feature (369)..(385): n includes a, c, g, or t, or contains no nucleotide
gatcagagcaccaagctcagcagaaccaggctgaattccgcatgggtcctgtgacctcagcccacgtggggacctacagatgctacagctcactcagctccaacccctacctgctgtctctccccagtgaccccctggagctcgtggtctcagaagcagctgagaccctcagcccatcacaaaacaagacagactccacgactacatccctaggccaacacccccaggattacacagtggagaatctcatccgcatgggtgtggctggcttggtcctggtggtcctcgggattctgctatttgaggctcagcacagccagagaagcctacaagatgcagccgggaggtgaacagcagagaggacaatgnnnnnnnnnnnnnnnnngagcctcagggacagatctgatgatcccaggaggctctggaggacaatctaggacctacattatctggactgtatgctggtcatttctagagacagcaatcaatatttgagtgtaaggaaactgtctggggtgattcctagaagatcattaaact

SEQ ID NO: 4888 - DNA, 426 bp, Homo sapiens
  misc_feature (181)..(181): n includes a, c, g, or t, or contains no nucleotide
cacactttggttcagtcccggtgcccctgccaagatgtggaaggggccgggtgaagacaggcttgagggccgccccagcaggctctgggtatgacctgcctctggccctggtcctgggcggggcctgtgggtggagtagtacccccaggccctgccctgggtgacagactgggaggaaacnaggctggacctgggcaggcgggatgtgttggccacagggagaggcggaccggcacccggtgggacctcctaggactgggccttcttccagggggcccctggcagcagctggggtgtcgggcagaatgtgacttgtggccttaccatggacttgaatgggacttggctggcctcaggatcttgtgcctggaaatagcctgaggtggctcaggaagcggagaaagggtgccagaccattctctggcg

SEQ ID NO: 4889 - DNA, 381 bp, Homo sapiens
  misc_feature (64)..(67): n includes a, c, g, or t, or contains no nucleotide
  misc_feature (69)..(70): n includes a, c, g, or t, or contains no nucleotide
  misc_feature (73)..(89): n includes a, c, g, or t, or contains no nucleotide
agaagttcagggttcctcactctagtcactaaagaaggattttactctcccagcccagaaaggnnnntnnttnnnnnnnnnnnnnnnnngactttagtcttaattaggtaccttattaacaggaaatgctaaggtaccttctctgtggaacaatctgcaatgtctaaatcgccttaaaagagcccatttcttagctgctgaaatcagtgctctttcacttcttcagagaagcagggatggtacctacccggcaggtaggttagatgtgggtggtgcatgttaatttcccttagaagttccaagccctgtttcctgcgtaaaggtggtatgtccagttcagagatgtgtataatgagcatggcttgttaagatcaggaggcc

SEQ ID NO: 4890 - DNA, 467 bp, Homo sapiens
  misc_feature (26)..(26): n includes a, c, g, or t, or contains no nucleotide
  misc_feature (134)..(134): n includes a, c, g, or t, or contains no nucleotide
  misc_feature (240)..(337): n includes a, c, g, or t, or contains no nucleotide
  misc_feature (339)..(344): n includes a, c, g, or t, or contains no nucleotide
  misc_feature (359)..(368): n includes a, c, g, or t, or contains no nucleotide
  misc_feature (370)..(372): n includes a, c, g, or t, or contains no nucleotide
  misc_feature (374)..(375): n includes a, c, g, or t, or contains no nucleotide
  misc_feature (377)..(378): n includes a, c, g, or t, or contains no nucleotide
  misc_feature (380)..(380): n includes a, c, g, or t, or contains no nucleotide
  misc_feature (414)..(440): n includes a, c, g, or t, or contains no nucleotide
tccccctagggctcaggcactgaggngcctggggacagtggagcatatgggtgggagacagatggagggtaccctatttacaactgagtcagccaagccactgatgggaatatacagatttaggtgctaaaccntttattttccacggatgagtcacaatctgaagaatcaaacttccatcctgaaaatctatatgtttcaaaaccacttgccatcctgttagattgccagttcctgggnnnnnnnnnnnnnnnnnnnnnnnnnnnnnnnnnnnnnnnnnnnnnnnnnnnnnnnnnnnnnnnnnnnnnnnnnnnnnnnnnnnnnnnnnnnnnnnnnnannnnnnaaaaaaaaaaaaaannnnnnnnnnannnannannanattgagggcctccaggacttggcaagtcttggtnnnnnnnnnnnnnnnnnnnnnnnnnnngatgggcaggcaaatctgtccgttctc

SEQ ID NO: 4891 - DNA, 408 bp, Homo sapiens
  misc_feature (26)..(26): n includes a, c, g, or t, or contains no nucleotide
  misc_feature (35)..(35): n includes a, c, g, or t, or contains no nucleotide
  misc_feature (40)..(40): n includes a, c, g, or t, or contains no nucleotide
  misc_feature (65)..(65): n includes a, c, g, or t, or contains no nucleotide
  misc_feature (74)..(74): n includes a, c, g, or t, or contains no nucleotide
  misc_feature (79)..(79): n includes a, c, g, or t, or contains no nucleotide
  misc_feature (86)..(86): n includes a, c, g, or t, or contains no nucleotide
  misc_feature (93)..(93): n includes a, c, g, or t, or contains no nucleotide
  misc_feature (100)..(100): n includes a, c, g, or t, or contains no nucleotide
  misc_feature (108)..(108): n includes a, c, g, or t, or contains no nucleotide
  misc_feature (126)..(126): n includes a, c, g, or t, or contains no nucleotide
  misc_feature (138)..(138): n includes a, c, g, or t, or contains no nucleotide
  misc_feature (146)..(146): n includes a, c, g, or t, or contains no nucleotide
  misc_feature (149)..(149): n includes a, c, g, or t, or contains no nucleotide
  misc_feature (157)..(157): n includes a, c, g, or t, or contains no nucleotide
  misc_feature (169)..(169): n includes a, c, g, or t, or contains no nucleotide
  misc_feature (173)..(173): n includes a, c, g, or t, or contains no nucleotide
  misc_feature (186)..(187): n includes a, c, g, or t, or contains no nucleotide
  misc_feature (205)..(205): n includes a, c, g, or t, or contains no nucleotide
  misc_feature (255)..(255): n includes a, c, g, or t, or contains no nucleotide
ccggactggacatggtcactcagtanccgcctgcnagtgntcgccatgactgatcatggctcttngcatttttngggtnaaatggnagacttnccggatncctgtcangggtgtcccccatgcctnggaagaggagcntggtggcntgnccagcccntggggcccggcnacanggcctgggccttnnccccttccctcaagccangggctcctcctcctgtcgtgggctcattgtgaccactggcctctctacangcacggcctgtggcctgttcaaggcagaaccacgacccttgactcccgggtggggaggtggccaaggatgctggagctgaatcagacgctgacagttcttcaggcatttctatttcacaatcgaattgaacacattggccaaataaagttgaa

SEQ ID NO: 4892 - DNA, 398 bp, Homo sapiens
  misc_feature (71)..(72): n includes a, c, g, or t, or contains no nucleotide
  misc_feature (98)..(98): n includes a, c, g, or t, or contains no nucleotide
  misc_feature (239)..(278): n includes a, c, g, or t, or contains no nucleotide
aggccagcaggagacaggacccccgaagctgaggccttgggatggagcagaagccggagtggcggggcacnntgccgccttccccatcacggagggtnccagactgtccactcgggggtggagtgagactgactgcaagccccaccctccttgagactggagctggcgtctgcatacgagagacttggttgaacttggttggtccttgtctgcaccctcgacaagaccacactttgggnnnnnnnnnnnnnnnnnnnnnnnnnnnnnnnnnnnnnnnntcccagtttgcgaattatagagacaatctattttgttacttgcacttgttattcgaaccactgagagcgagatgggaagcatagatatctatatttttatttctactatgagggccttgt

SEQ ID NO: 4893 - DNA, 535 bp, Homo sapiens
cagtcagggtcagctgatctacgagtctgccatcacctgtgagtacctggatgaagcatacccagggaagaagctgttgccggatgacccctatgagaaagcttgccagaagatgatcttagagttgttttctaaggtgccatccttggtaggaagctttattagaagccaaaataaagaagactatgctggcctaaaagaagaatttcgtaaagaatttaccaagctagaggaggttctgactaataagaagacgaccttctttggtggcaattctatctctatgattgattacctcatctggccctggtttgaacggctggaagcaatgaagttaaatgagtgtgtagaccacactccaaaactgaaactgtggatggcagccatgaaggaagatcccacagtctcagccctgcttactagtgagaaagactggcaaggtttcctagagctctacttacagaacagccctgaggcctgtgactatgggctctgaagggggcaggagtcagcaataaagctatgtctgatattt

SEQ ID NO: 4894 - DNA, 509 bp, Homo sapiens
  misc_feature (26)..(44): n includes a, c, g, or t, or contains no nucleotide
  misc_feature (238)..(238): n includes a, c, g, or t, or contains no nucleotide
aatttacatctgtggaatagcattcnnnnnnnnnnnnnnnnnnngagctaaacagacaggaggagggaccacactggtggtaagagaaattaagctgctcagcaaggaactgcggagcttcctgacagctcttgtatcactgctctctgtctatgtgaccggtgtgtgcgtggccttcatactcctctccaaatcaaaatccaaccctctaagaaacaaagaaataaaagaagactcncaaaagaagaagagtgctcggcgtatttttcaggaaattgctcaagaactataccataagagacatgtggaaacaaatcagcaatctgagaaagataacaacacttatgaaaacagaagagtactttccaactatgaaaggccatagaaacgttttaattttcaatgaagtcactgaaaatccaactccaggagctatggcagtgttaatgaacatatatcatcaggtcttaaaaaaaaataaaggtaaactgaaaagacaactggctaca

SEQ ID NO: 4895 - DNA, 424 bp, Homo sapiens
  misc_feature (41)..(57): n includes a, c, g, or t, or contains no nucleotide
  misc_feature (147)..(147): n includes a, c, g, or t, or contains no nucleotide
  misc_feature (149)..(149): n includes a, c, g, or t, or contains no nucleotide
  misc_feature (359)..(361): n includes a, c, g, or t, or contains no nucleotide
tcgcatccacttatgtcagcgctcgcccggcagccagggcnnnnnnnnnnnnnnnnngaaacgctacgtggagctgaagaaggcgaatcccgacctacccatcctaatccgcgaatgctccgatgtgcagcccaagctctgggcccngntacgcatttggccaagagacgaatgtccctttgaacaacttcagtgctgatcaggtaaccagagccctggagaacgttctaagtggtaaagcctgaagcctccactgaggattaagagcaacagccccagagcctgggctctgctggacttagtataatgtgaaaaaaatgtgttctcctattcctcataaagcttgtgctgtaaaatannntctcagggtgttcttgtcctcatctaccctctaccccttactgtgcaaccactgaggcaaagt

SEQ ID NO: 4896 - DNA, 400 bp, Homo sapiens
  misc_feature (220)..(221): n includes a, c, g, or t, or contains no nucleotide
  misc_feature (225)..(225): n includes a, c, g, or t, or contains no nucleotide
  misc_feature (228)..(228): n includes a, c, g, or t, or contains no nucleotide
  misc_feature (330)..(350): n includes a, c, g, or t, or contains no nucleotide
agcctgtagcttatatttgacattcttcactgtctgttgtttacctaccgtagctttttaccgttcacttccccttccaactatgtccagatgtgcaggctcctcctctctggactttctccaaaggcactgaccctcggcctctactttgtcccctcacctccaccccctcctgtcaccggccttgtgacattcactcagagaagaccacaccaaggannggcngcngctggcccaggagagaacacggggaggtttgtttgtgtgaaaggaaagtagtccaggctgtccctgaaactgagtctgtggacactgtggaaagctttgaannnnnnnnnnnnnnnnnnnnnagtctttgtaatgcttgtacagttgatgtcgatgctcactgcttctgctt

SEQ ID NO: 4897 - DNA, 186 bp, Homo sapiens
  misc_feature (50)..(67): n includes a, c, g, or t, or contains no nucleotide
actccatccgcacagacagatgcaaacagctcctctagttctgcagagcnnnnnnnnnnnnnnnnnntaatcattttaaaaagtactgtccttgaaatagatttgctgtgggaagaagggcagtgagtgtgggagaaaggagccgtgagcgtggggaaccccacagagcccaaaggactttttcag

SEQ ID NO: 4898 - DNA, 418 bp, Homo sapiens
  misc_feature (29)..(93): n includes a, c, g, or t, or contains no nucleotide
  misc_feature (109)..(110): n includes a, c, g, or t, or contains no nucleotide
  misc_feature (163)..(177): n includes a, c, g, or t, or contains no nucleotide
  misc_feature (202)..(202): n includes a, c, g, or t, or contains no nucleotide
  misc_feature (208)..(239): n includes a, c, g, or t, or contains no nucleotide
  misc_feature (241)..(244): n includes a, c, g, or t, or contains no nucleotide
  misc_feature (246)..(339): n includes a, c, g, or t, or contains no nucleotide
caggcgaacgaggtgacggaaattatgcnnnnnnnnnnnnnnnnnnnnnnnnnnnnnnnnnnnnnnnnnnnnnnnnnnnnnnnnnnnnnnnnncaactcctggatatgnnagctcaaccttcaacaagactacacagaacctggcccagaagaagtgctgggnnnnnnnnnnnnnnnggatctgcgtggggctggtggtggntggtgnnnnnnnnnnnnnnnnnnnnnnnnnnnnnnnngnnnntnnnnnnnnnnnnnnnnnnnnnnnnnnnnnnnnnnnnnnnnnnnnnnnnnnnnnnnnnnnnnnnnnnnnnnnnnnnnnnnnnnnnnnnnnnnnnntcctgaaggagaagccaaatggctgcactggccgattctggtctccagaggaccttggtgtttgctctcccttgaccca

SEQ ID NO: 4899 - DNA, 441 bp, Homo sapiens
  misc_feature (47)..(47): n includes a, c, g, or t, or contains no nucleotide
  misc_feature (114)..(129): n includes a, c, g, or t, or contains no nucleotide
  misc_feature (262)..(262): n includes a, c, g, or t, or contains no nucleotide
  misc_feature (295)..(295): n includes a, c, g, or t, or contains no nucleotide
  misc_feature (318)..(318): n includes a, c, g, or t, or contains no nucleotide
  misc_feature (348)..(348): n includes a, c, g, or t, or contains no nucleotide
ctcagagccacacagaacttctgagaggggctgttagcattgcgcancatcttcagttctccagtaaatgatattgcgttcgtgcctcagctttaagcacaagtagcagcagcnnnnnnnnnnnnnnnnagggcatcatggccctatgattaaccagagtgatctaacctagactaaaattgggaacttatttgcaatttttgaccctgaccactaactagtgattcttctccaaaattgagaaagacagcacccattgaancagatatgtgtgtgaaagtatatttttcaattnccagatttttaattttaaggctnccaggaaagaaaggagagtagaacattttncctcattttatcaaatcctctcttgccctccctcaattcccctgtaacattcctgaagctgttcccactcccagatggttttatcaatagcct

SEQ ID NO: 4900 - DNA, 512 bp, Homo sapiens
  misc_feature (26)..(49): n includes a, c, g, or t, or contains no nucleotide
  misc_feature (462)..(462): n includes a, c, g, or t, or contains no nucleotide
atcctttaagaatgagggtgccgaannnnnnnnnnnnnnnnnnnnnnnngatgagtgaagaggctaagcgaggagcacccaacccttggctctttgaggagccagaggagaccagaggcttgggttttgatgaaatccggcaacagcagcagaaaattatccaagaacaggatgcaggccttgatgccctttcctctatcataagtcgccaaaaacaaatggggcaggaaattgggaatgaattggatgaacaaaatgagataattgacgaccttgccaacctagtggagaacacagatgaaaaacttcgcaatgaaaccaggcgggtaaacatggtggacagaaagtcagcctcttgtgggatgatcatggtgattttactgctgcttgtggctatcgtggttgttgcagtctggccgaccaactgatggcagtaaagagaccaccagcagtgacacctgncaatgacagatgcaagcccaacacccttttggtacgcaaaacctgctctc

SEQ ID NO: 4901 - DNA, 496 bp, Homo sapiens
  misc_feature (184)..(185): n includes a, c, g, or t, or contains no nucleotide
  misc_feature (190)..(192): n includes a, c, g, or t, or contains no nucleotide
  misc_feature (195)..(196): n includes a, c, g, or t, or contains no nucleotide
  misc_feature (200)..(201): n includes a, c, g, or t, or contains no nucleotide
  misc_feature (203)..(203): n includes a, c, g, or t, or contains no nucleotide
  misc_feature (205)..(207): n includes a, c, g, or t, or contains no nucleotide
  misc_feature (209)..(212): n includes a, c, g, or t, or contains no nucleotide
  misc_feature (214)..(219): n includes a, c, g, or t, or contains no nucleotide
  misc_feature (222)..(321): n includes a, c, g, or t, or contains no nucleotide
ttgttgctggcatcccggccaggtgggcggggactaacaaagacagctgtttagggtcttctcccctcacccatgctttcatcatcccctccgcacagcctccccgtccaggccttctaaccacacctacccagggctgccgcattcctgcactcagaagtctgcagcggtgcctcacaaactnnattgnnnatnnaaannantnnngnnnntnnnnnntannnnnnnnnnnnnnnnnnnnnnnnnnnnnnnnnnnnnnnnnnnnnnnnnnnnnnnnnnnnnnnnnnnnnnnnnnnnnnnnnnnnnnnnnnnnnnnnnnnngggcgagagtgcccagggctgatatatattggaaatatcacccctgaagccatcgctggcccccacctcctgtggactgatgccccagggattcccaccccacttctgcaaccccaggtatccttcattatccaccccatcccagactcccaccccagggattgcccgtgaagac

SEQ ID NO: 4902 - DNA, 489 bp, Homo sapiens
  misc_feature (108)..(126): n includes a, c, g, or t, or contains no nucleotide
cctggagggcatcttcacatccaagacagattcctggtcttttggggtgctgctctgggagatcttctcactgggctacatgccctatcctgggcgcaccaaccaggnnnnnnnnnnnnnnnnnnntggaggaggccggatggaccctcctaggggctgcccagggcctgtgtaccgcatcatgacccagtgttggcagcacgagcctgagctccgccctagctttgccagcatcttggagcgtctgcagtactgcactcaggacccggatgtgctgaattcactcctgccaatggagctggggcccaccccagaggaggaagggacttctgggctggggaacagatctttggagtgcctaagacccccacagccccaggaactgagtccagagaagttgaaaagctggggaggtagccctcttggcccctggctgtcctctggcctcaagcccctcaaatccaggggcctccaacctcagaacctttg

SEQ ID NO: 4903 - DNA, 369 bp, Homo sapiens
  misc_feature (61)..(61): n includes a, c, g, or t, or contains no nucleotide
  misc_feature (63)..(63): n includes a, c, g, or t, or contains no nucleotide
  misc_feature (330)..(330): n includes a, c, g, or t, or contains no nucleotide
ttcttcgaattgtgctgagaagttccagggagcctggtggtacgccgactgtcatgcttcnancctcaatggtctctacctcatgggaccccatgagagctatgccaatggtatcaactggagtgcggcgaaggggtacaaatatagctacaaggtgtcagagatgaaggtgcggcccgcctagacgggccaggacccctccacatgcacctgctagtggggaggccacacccacaagcgctgcgtcgtggaagtcaccccatttccccagccagacacactcccatgacgcccacagctgcccctttgcccccagctcagtcaagccgncacatgcccacaacctcaccagagggagaattatgtttc

SEQ ID NO: 4904 - DNA, 484 bp, Homo sapiens
  misc_feature (143)..(193): n includes a, c, g, or t, or contains no nucleotide
  misc_feature (272)..(314): n includes a, c, g, or t, or contains no nucleotide
  misc_feature (392)..(454): n includes a, c, g, or t, or contains no nucleotide
  misc_feature (456)..(457): n includes a, c, g, or t, or contains no nucleotide
cttgctggtggtctcagcccttcacatcctcattcttatactgcttttcgtggccactttggacaagtcctggtggactctccctgggaaagagtccctgaatctctggtacgactgcacgtggaacaacgacaccaaaacannnnnnnnnnnnnnnnnnnnnnnnnnnnnnnnnnnnnnnnnnnnnnnnnnnctcatggtgctctccctcattctctgctgtctctccttcatcctgttcatgttccagctctacaccatgcgacgaggannnnnnnnnnnnnnnnnnnnnnnnnnnnnnnnnnnnnnnnnnntggcggtgtttactggcgccttgatctatgccattcacgccgaggagatcctggagaagcacccgcgagggggcagcnnnnnnnnnnnnnnnnnnnnnnnnnnnnnnnnnnnnnnnnnnnnnnnnnnnnnnnnnnnnnnntnnacatccacctacggaagcgggagtgag

SEQ ID NO: 4905 - DNA, 494 bp, Homo sapiens
  misc_feature (56)..(76): n includes a, c, g, or t, or contains no nucleotide
  misc_feature (87)..(87): n includes a, c, g, or t, or contains no nucleotide
  misc_feature (98)..(98): n includes a, c, g, or t, or contains no nucleotide
  misc_feature (100)..(100): n includes a, c, g, or t, or contains no nucleotide
  misc_feature (102)..(107): n includes a, c, g, or t, or contains no nucleotide
  misc_feature (109)..(109): n includes a, c, g, or t, or contains no nucleotide
  misc_feature (111)..(111): n includes a, c, g, or t, or contains no nucleotide
  misc_feature (115)..(115): n includes a, c, g, or t, or contains no nucleotide
  misc_feature (119)..(164): n includes a, c, g, or t, or contains no nucleotide
  misc_feature (327)..(351): n includes a, c, g, or t, or contains no nucleotide
tgcccgatcagatgcagccgcaagtcccgccgctccattaccaagagctcatgccnnnnnnnnnnnnnnnnnnnnnggagcccaagncaaagaggggnanannnnnntngncccngaannnnnnnnnnnnnnnnnnnnnnnnnnnnnnnnnnnnnnnnnnnnnntacacaaagagttcccatctcaaggcacacctgcgaacccacacaggtgagaaaccttaccactgtgactgggacggctgtggatggaaattcgcccgctcagatgaactgaccaggcactaccgtaaacacacggggcaccgcccgttccagtgccaaaaannnnnnnnnnnnnnnnnnnnnnnnnaccacctcgccttacacatgaagaggcatttttaaatcccagacagtggatatgacccacactgccagaagagaattcagtattttttacttttcacactgtcttcccgatgagggaaggagcccagccagaaagcactacaa

SEQ ID NO: 4906 - DNA, 450 bp, Homo sapiens
attccagtggccatcaaagtgttgagggaaaacacatcccccaaagccaacaaagaaatcttagacgaagcatacgtgatggctggtgtgggctccccatatgtctcccgccttctgggcatctgcctgacatccacggtgcagctggtgacacagcttatgccctatggctgcctcttagaccatgtccgggaaaaccgcggacgcctgggctcccaggacctgctgaactggtgtatgcagattgccaaggggatgagctacctggaggatgtgcggctcgtacacagggacttggccgctcggaacgtgctggtcaagagtcccaaccatgtcaaaattacagacttcgggctggctcggctgctggacattgacgagacagagtaccatgcagatgggggcaaggtgcccatcaagtggatggcgctggagtccattctccgccgg

SEQ ID NO: 4907 - DNA, 531 bp, Homo sapiens
  misc_feature (54)..(54): n includes a, c, g, or t, or contains no nucleotide
  misc_feature (95)..(95): n includes a, c, g, or t, or contains no nucleotide
  misc_feature (99)..(100): n includes a, c, g, or t, or contains no nucleotide
  misc_feature (103)..(104): n includes a, c, g, or t, or contains no nucleotide
  misc_feature (106)..(107): n includes a, c, g, or t, or contains no nucleotide
  misc_feature (109)..(109): n includes a, c, g, or t, or contains no nucleotide
  misc_feature (112)..(112): n includes a, c, g, or t, or contains no nucleotide
  misc_feature (118)..(118): n includes a, c, g, or t, or contains no nucleotide
  misc_feature (121)..(121): n includes a, c, g, or t, or contains no nucleotide
  misc_feature (126)..(128): n includes a, c, g, or t, or contains no nucleotide
  misc_feature (134)..(134): n includes a, c, g, or t, or contains no nucleotide
  misc_feature (138)..(159): n includes a, c, g, or t, or contains no nucleotide
  misc_feature (208)..(222): n includes a, c, g, or t, or contains no nucleotide
  misc_feature (503)..(503): n includes a, c, g, or t, or contains no nucleotide
tgatgacatactcagtgtggcctccgtgcgtccagctgtcttgcaggtggaatnccacccatacttggctcaaaatgagctaattgcccactgcnaagnnacnngnncntgnaggtanctncttannncccttngggnnnnnnnnnnnnnnnnnnnnnngatcctgatgagcctgtcctgctggaggaaccagtagtcctggcattgnnnnnnnnnnnnnnncgatctccagctcagatcttgctcaggtggcaggtccagcggaaagtgatctgcatccccaaaagtatcactccttctcgaatccttcagaacatcaaggtgtttgacttcacctttagcccagaagagatgaagcagctaaatgccctgaacaaaaattggagatatattgtgcctatgcttacggtggatgggaagagagtcccaagggatgcagggcatcctctgtacccctttaatgacccgtactgagaccacagcttcttggcctcccttccagntctgcagctaatgaggtcctgccacaac

SEQ ID NO: 4908 - DNA, 452 bp, Homo sapiens
  misc_feature (26)..(26): n includes a, c, g, or t, or contains no nucleotide
  misc_feature (275)..(275): n includes a, c, g, or t, or contains no nucleotide
  misc_feature (353)..(370): n includes a, c, g, or t, or contains no nucleotide
  misc_feature (387)..(388): n includes a, c, g, or t, or contains no nucleotide
  misc_feature (393)..(393): n includes a, c, g, or t, or contains no nucleotide
  misc_feature (399)..(406): n includes a, c, g, or t, or contains no nucleotide
  misc_feature (416)..(416): n includes a, c, g, or t, or contains no nucleotide
tcctgtaaggcagcaaggtagcgtgnccggcgcccgagctggggttgtgtccctgctgggctgccgttccagctggactgccgccatggaactcagcgccgaatacctccgcgagaagctgcagcgggacctggaggcggagcatgtggaggtggaggacacgaccctcaaccgttgctcctgtagcttccgagtcctggtggtgtcggccaagttcgaggggaaaccgctgcttcagagacacaggctggtgaacgcgtgcctagcagaagagntcccgcacatccatgcctttgaacagaaaaccctgaccccagaccagtgggcacgtgagcgacagaaatgagggactnnnnnnnnnnnnnnnnnnaaattataaatctggannaaaanaaaaannnnnnnngatgtgtgtntgggaggggtgctgaggccgagtctaggacctggcc

SEQ ID NO: 4909 - DNA, 547 bp, Homo sapiens
gaggcctgcgtgttggatgaacttgacatggagctagccttcctgaccatgtctggcatggcatggaagagtttgaggacatggagagaagtctgccactatgcctgcagctctacgccccagggctgtcgccagaactatcatggagtgtgcaatgggggaccgcggcatgcagctcatgcacgccaacgcccagcggacagatgctctccagccaccgcacgagtatgtgccctgggtcaccgtcaatgggaaacccttggaagatcagacccagctccttacccttgtctgccagttgtaccagggcaagaagccggatgtctgcccttcctcaaccagctccctccggagtgtttgcttcgagtgttggccggtgggctgcggagagctcatggaaggcgagtgggaactcggctgcctgcctttttttctgatccagaccctcggcacctgctacttaccaactggaaaattttatgcatcccatgaagcccagatacacaaaattccacccctagatcaagaatcctgctccactaagaat

SEQ ID NO: 4910 - DNA, 553 bp, Homo sapiens
  misc_feature (149)..(164): n includes a, c, g, or t, or contains no nucleotide
  misc_feature (170)..(171): n includes a, c, g, or t, or contains no nucleotide
  misc_feature (187)..(187): n includes a, c, g, or t, or contains no nucleotide
  misc_feature (260)..(342): n includes a, c, g, or t, or contains no nucleotide
tgtgaccctggcacttggcttggaggctgcccctgccctccccccaccagttgtgccttggtgccttgtccgcctcagctgtgccttaaggactaattctggcacccctttccagggggttccctgaatgcctttttctctgagtgccnnnnnnnnnnnnnnnnggcctnnagagaaaggggctttnggctctgcccccctctgcttgggaacactgggtattctcatgagctcatccaagccaaggttggacccctccnnnnnnnnnnnnnnnnnnnnnnnnnnnnnnnnnnnnnnnnnnnnnnnnnnnnnnnnnnnnnnnnnnnnnnnnnnnnnnnnnnntattgtggtgccgcctcaggttaggggctctcagccatctctaacctctgccctcgctgctcttggaattgcgcccccaagatgctctctcccttctccaatgagggagccacagaatcctgagaaggtgaatgtgccctaacctgctcctctgtgcctaggccttacgcatttgctgactgactcagcccccatgcttctggggaccttt

SEQ ID NO: 4911 - DNA, 46 bp, Homo sapiens
agttgcttttttaggctacagtgtctcgatgccataatcagaacac

SEQ ID NO: 4912 - DNA, 353 bp, Homo sapiens
  misc_feature (139)..(166): n includes a, c, g, or t, or contains no nucleotide
agtacttgctaaaaatggcaacagaggagtgaggagtgctgctgtagatgacaacctccattctattttagaataaattcccaacttctcttgctttctatgctgtttgtagtgaaataatagaatgagcacccattcnnnnnnnnnnnnnnnnnnnnnnnnnnnncatgtttgaaatgaggtctgtttaaagtggcaatctcagatgcagtttggagagtcagatctttctccttgaatatctttcgataaacaacaaggtggtgtgatcttaatatatttgaaaaaaacttcattctcgtgagtcatttaaatgtgtacaatgtacacactggtacttagagtttctgttt

SEQ ID NO: 4913 - DNA, 499 bp, Homo sapiens
  misc_feature (136)..(180): n includes a, c, g, or t, or contains no nucleotide
  misc_feature (192)..(244): n includes a, c, g, or t, or contains no nucleotide
  misc_feature (303)..(327): n includes a, c, g, or t, or contains no nucleotide
tacctgggctcaatggtttgaaacccagcacatcaatatgacctcccagcaatgcaccaatgcaatgcaggtcattaacaattatcaacggcgatgcaaaaaccaaaatactttccttcttacaacttttgctaannnnnnnnnnnnnnnnnnnnnnnnnnnnnnnnnnnnnnnnnnnnncaaaactcgcannnnnnnnnnnnnnnnnnnnnnnnnnnnnnnnnnnnnnnnnnnnnnnnnnnnnactccaagtccacagaatatttcaaactgcaggtatgcgcagacaccagcaaacatgtnnnnnnnnnnnnnnnnnnnnnnnnnagatcaacgacgagaccctccacagtatccggtggttccagttcacctggatagaatcatctaagctcctgtatcagcactcctcatcatcactcatctgccaagctcctcaatcatagccaagatcccatctctccatatactttgggtatcagcatctgtcctcatcagt

SEQ ID NO: 4914 - DNA, 466 bp, Homo sapiens
  misc_feature (76)..(104): n includes a, c, g, or t, or contains no nucleotide
  misc_feature (249)..(263): n includes a, c, g, or t, or contains no nucleotide
  misc_feature (291)..(291): n includes a, c, g, or t, or contains no nucleotide
  misc_feature (305)..(305): n includes a, c, g, or t, or contains no nucleotide
  misc_feature (372)..(372): n includes a, c, g, or t, or contains no nucleotide
  misc_feature (409)..(409): n includes a, c, g, or t, or contains no nucleotide
  misc_feature (425)..(440): n includes a, c, g, or t, or contains no nucleotide
ggctggcaagctcaagaaagacacgtacattgagaatgagaagctcatctcaggaaagcgccaggagctggtcacnnnnnnnnnnnnnnnnnnnnnnnnnnnnngtagcccctgcccgcatcctccagggggcccagggtgcctgcactttgctgtggcaggcagattgggtggtagtgggaggttgtgcatggaggccagtgaaagctgacatctgtaaaaggccttcaaggaagagaaaccaggccnnnnnnnnnnnnnnntgagtttgccgtttgtccttaactttcntttttttttttttnaaaaaaagaaaactttaaaaaaactcccattaaaaacaaaacatctttgtgttttgaacaaaggaantttcaatatttgattggtattctgttctgaagtctangatatttttcagcctnnnnnnnnnnnnnnnntatgcccttctaattctgatgtttgg

SEQ ID NO: 4915 - DNA, 328 bp, Homo sapiens
  misc_feature (26)..(26): n includes a, c, g, or t, or contains no nucleotide
  misc_feature (51)..(51): n includes a, c, g, or t, or contains no nucleotide
  misc_feature (53)..(53): n includes a, c, g, or t, or contains no nucleotide
  misc_feature (68)..(84): n includes a, c, g, or t, or contains no nucleotide
  misc_feature (86)..(86): n includes a, c, g, or t, or contains no nucleotide
  misc_feature (243)..(243): n includes a, c, g, or t, or contains no nucleotide
gtcccggatgttgaggatcccgcaanccgaggagcctggggagagcttttntnacaaggtcatgagannnnnnnnnnnnnnnnncntgcagcggctgcagacctggtggcacggggttctggcctgggtgaaggagaaggtggtggccctggtccatgcagtgcaggccctctggaaacagttccagagtttctgctgctctctgtcagagctcttcatgtcctctttccagtcctacggagncccacggggggacaaggaggagctgacaccccagaagtgctctgaaccccaatcctcaaaatgaagatactgacaccacctttgc

SEQ ID NO: 4916 - DNA, 468 bp, Homo sapiens
  misc_feature (386)..(391): n includes a, c, g, or t, or contains no nucleotide
  misc_feature (423)..(423): n includes a, c, g, or t, or contains no nucleotide
agagttggattctcttatcaaggctaccatagctgggggtggtgtgatccctcacatccacaaatctctgattggaaagaagggacagcagaaaactgcttagagggatgctttaaccaaccctcttcctccccgtcattgtactgtaactgggacagaagaaataatggggatatgtggaatttttaacaacagttaaatggaaaagcatagacaattactgtagacatgataaaagaaacatttgtatgttcttagactcgaagtttgataaaagtaccttttcatgtggtgacagttgtgtgttgattggctaggtttctcccgtgtgttttatacaaaaatggaattgataaaccattttttacaaaattaaaaaaaaaaannnnnnttctgttcatgatgtattagaaatattttacncagactttaaatattttaaatctcagattggttattcagagtaac

SEQ ID NO: 4917 - DNA, 286 bp, Homo sapiens
  misc_feature (52)..(66): n includes a, c, g, or t, or contains no nucleotide
  misc_feature (138)..(177): n includes a, c, g, or t, or contains no nucleotide
  misc_feature (185)..(232): n includes a, c, g, or t, or contains no nucleotide
attctaaacactcgtgcttgcgtttgaagcctcgcgtcactcagtcgcgtgnnnnnnnnnnnnnnntgttgtctgccttggccgaaagatgaaaaaaagcctgaaccccaacccccagctggttgagagcaccctgcnnnnnnnnnnnnnnnnnnnnnnnnnnnnnnnnnnnnnnnnaagtacannnnnnnnnnnnnnnnnnnnnnnnnnnnnnnnnnnnnnnnnnnnnnnnattcaccggggatctcctgggctgggctctccttggaagtgaggccttttatta

SEQ ID NO: 4918 - DNA, 540 bp, Homo sapiens
  misc_feature (56)..(56): n includes a, c, g, or t, or contains no nucleotide
  misc_feature (60)..(61): n includes a, c, g, or t, or contains no nucleotide
  misc_feature (64)..(64): n includes a, c, g, or t, or contains no nucleotide
  misc_feature (73)..(73): n includes a, c, g, or t, or contains no nucleotide
  misc_feature (118)..(118): n includes a, c, g, or t, or contains no nucleotide
  misc_feature (125)..(125): n includes a, c, g, or t, or contains no nucleotide
  misc_feature (159)..(159): n includes a, c, g, or t, or contains no nucleotide
  misc_feature (226)..(226): n includes a, c, g, or t, or contains no nucleotide
  misc_feature (231)..(231): n includes a, c, g, or t, or contains no nucleotide
  misc_feature (233)..(233): n includes a, c, g, or t, or contains no nucleotide
  misc_feature (239)..(239): n includes a, c, g, or t, or contains no nucleotide
  misc_feature (273)..(289): n includes a, c, g, or t, or contains no nucleotide
  misc_feature (353)..(353): n includes a, c, g, or t, or contains no nucleotide
  misc_feature (355)..(417): n includes a, c, g, or t, or contains no nucleotide
cagaatttatctgagtctgctgctgtgaaggagatactgaaggagcaggaaaaccngaannggncctgatagnccgccatctgtgcaggtcctactgctctgttggctcatgaaatanggttttnggaagtaaagttacaacacaccctcttgctaaangacaaaatgatgaatggaggtcattacacctactctgagaatcgtgtggaaaaagacggcctgattncttancnaagccngggggcctgggaccagcttcgagtttgcgcttgnnnnnnnnnnnnnnnnnaatggcaaggaggtggcggctcaagtgaaggctccacttgttcttaaagactagagcagcgaancnnnnnnnnnnnnnnnnnnnnnnnnnnnnnnnnnnnnnnnnnnnnnnnnnnnnnnnnnnnnnnnaaacagtggtaggttaatgtgttcagaagtcgctgtccttactacttttgcggaagtatggaagtcacaactacacagagatttctcagcctacaaattgtgtctatacatttctaagccttg

SEQ ID NO: 4919 - DNA, 43 bp, Homo sapiens
accttcattggcaacagcacggccatccaggagctgttcaagc

SEQ ID NO: 4920 - DNA, 601 bp, Homo sapiens
  misc_feature (43)..(44): n includes a, c, g, or t, or contains no nucleotide
  misc_feature (66)..(81): n includes a, c, g, or t, or contains no nucleotide
  misc_feature (120)..(121): n includes a, c, g, or t, or contains no nucleotide
  misc_feature (147)..(147): n includes a, c, g, or t, or contains no nucleotide
  misc_feature (173)..(208): n includes a, c, g, or t, or contains no nucleotide
  misc_feature (210)..(213): n includes a, c, g, or t, or contains no nucleotide
  misc_feature (215)..(216): n includes a, c, g, or t, or contains no nucleotide
  misc_feature (218)..(220): n includes a, c, g, or t, or contains no nucleotide
  misc_feature (222)..(224): n includes a, c, g, or t, or contains no nucleotide
  misc_feature (226)..(262): n includes a, c, g, or t, or contains no nucleotide
  misc_feature (303)..(303): n includes a, c, g, or t, or contains no nucleotide
agtcgacgacttctcctgggagcccccgactgaggcggagacnnaggtgctgcaggcgcgacgggnnnnnnnnnnnnnnnnctcccggctcatgggcgactatctgctgcgcggttaccnnatgctgggcgagacgtgtgcggactncgggacgatcctcctccaagacaaannnnnnnnnnnnnnnnnnnnnnnnnnnnnnnnnnnncnnnncnnannngnnnannnnnnnnnnnnnnnnnnnnnnnnnnnnnnnnnnnnntcccaagctcgggagcaccagctggcctcagcctcagagcntccccctgggctctcgacctgcgccccagcccccagtacctcgtccggagcactgtgagggagctgcagcaggactcaaggcagcccaggggccacctgctcctgctgtgcctccaaatacagatgtcatggcctgcacacagacagccctcttgcagaagctgacctgggcctctgctgaactgggctctagcacctccctggagactagcatccagctgtgtggccttatccgcgcatgtgcggaggccctgcgcagcctgcagcagctacagcactaagagaagcccctgagaaa

SEQ ID NO: 4921 - DNA, 529 bp, Homo sapiens
tcgccgtctgtgaattggaccatcctatttaactggcttcagcctccccaccttcttcagccacctctctttttcagttggctgacttccacacctagcatctcatgagtgccaagcaaaaggagagaagagagaaatagcctgcgctgttttttagtttgggggttttgctgtttccttttatgagacccattcctatttcttatagtcaatgtttcttttatcacgatattattagtaagaaaacatcactgaaatgctagctgcaagtgacatctctttgatgtcatatggaagagttaaaacaggtggagaaattccttgattcacaatgaaatgctctcctttcccctgcccccagaacttttatccacttacctagattctacatattctttaaatttcatctcaggcctccctcaaccccaccacttcttttataactagtcctttactaatccaacccatgatgagctcctcttcctggcttcttactgaaaggttaccctgtaacatgcaattttgcatt

SEQ ID NO: 4922 - DNA, 568 bp, Homo sapiens
  misc_feature (125)..(164): n includes a, c, g, or t, or contains no nucleotide
  misc_feature (179)..(179): n includes a, c, g, or t, or contains no nucleotide
  misc_feature (298)..(373): n includes a, c, g, or t, or contains no nucleotide
  misc_feature (448)..(489): n includes a, c, g, or t, or contains no nucleotide
  misc_feature (530)..(530): n includes a, c, g, or t, or contains no nucleotide
  misc_feature (532)..(532): n includes a, c, g, or t, or contains no nucleotide
ctgaccgacaggaggaaaacaaggccgggttgctggacctgcctgacgcatctgtgaatggctggagctccgatgaggaaaaggcagggggcctggatgatgaagaggaggccgagctcgtcccnnnnnnnnnnnnnnnnnnnnnnnnnnnnnnnnnnnnnnnnttctgcctgggctgngtctccaacaccgcctcctacctgcgcctgtgggccctgagcctggcccacgcccagctgtccgaggttctgtgggccatggtgatgcgcataggcctgggcctgggccgggaggtggnnnnnnnnnnnnnnnnnnnnnnnnnnnnnnnnnnnnnnnnnnnnnnnnnnnnnnnnnnnnnnnnnnnnnnnnnnnngggactctcagccttcctgcacgccctgcggctgcactgggtggaattccagaacaagttctactcaggcacggnnnnnnnnnnnnnnnnnnnnnnnnnnnnnnnnnnnnnnnnnnagggcccactgcaggtcctgccagacctccttcctgacctntnaggcaggagaggaataaagacggtccgccctggcaa

SEQ ID NO: 4923 - DNA, 324 bp, Homo sapiens
  misc_feature (154)..(232): n includes a, c, g, or t, or contains no nucleotide
ccctggagaggatgttcctgtccttccccaccaccaagacctacttcccgcacttcgacctgagccacggctctgcccaggttaagggccacggcaagaaggtggccgacgccctgaccaacgccgtggcgcacgtggacgacatgcccaacgnnnnnnnnnnnnnnnnnnnnnnnnnnnnnnnnnnnnnnnnnnnnnnnnnnnnnnnnnnnnnnnnnnnnnnnnnnnnnnngctggtgaccctggccgcccacctccccgccgagttcacccctgcggtgcacgcctccctggacaagttcctggcttctgtgagcaccgtgc

SEQ ID NO: 4924 - DNA, 583 bp, Homo sapiens
ccagctctcaagagaaacgcacctgcaataaaacagtcttgtcggccagctgcccagggacggcagctacagcagcctctgcgtcctggtccgccagcacctcccgcttctccgtggtgacttggcgccgcttcctcacatctgtgctccgtgccctcttccctgcctcttccctcgcccacctgcctgcccccatactccccagcggagagcatgatccgtgcccttgcttctgactttcgcctctgggacaagtaagtcaatgtgggcagttcagtcgtctgggttttttccccttttctgttcatttcatctggctccccccaccacctccccaccccaccccccaccccctgcttcccctcactgcccaggtcgatcaagtggcttttcctgggacctgcccagctttgagaatctcttctcatccaccctctggcacccagcctctgagggaaggagggatggggcatagtgggagacccagccaagagctgagggtaagggcaggtaggcgtgaggctgtggacattttcggaatgttttggttttgttttttttaaaccgggcaatattgtgttca

SEQ ID NO: 4925 - DNA, 355 bp, Homo sapiens
  misc_feature (70)..(70): n includes a, c, g, or t, or contains no nucleotide
  misc_feature (81)..(81): n includes a, c, g, or t, or contains no nucleotide
  misc_feature (170)..(190): n includes a, c, g, or t, or contains no nucleotide
ccacagaagccaggagcaaatgtttctgcagtagtctctgtgctttgactcacctgttacttgaaatacnagtgaaccaangagactggagcatctgactcacaagaagaccagactgtggagaaataaaaatacctctttattttttgattgaaggaaggttttctccnnnnnnnnnnnnnnnnnnnnncatctctaattggaagaaattcctgtagcatcttctggagtctccagtggttgctgttgatgaggcctcttggacctctgctctgaggcttccagagagtcctctggatggcaccagaggctgcagaaggccaagaatcaagctagaaggccacatgtcaccgtg

SEQ ID NO: 4926 - DNA, 503 bp, Homo sapiens
  misc_feature (384)..(398): n includes a, c, g, or t, or contains no nucleotide
cctgggagagcctcagctctgctatatcctggatgccatcctgtttctgtatggaattgtcctcaccctcctctactgtcgactgaagatccaagtgcgaaaggcagctataaccagctatgagaaatcagatggtgtttacacgggcctgagcaccaggaaccaggagacttacgagactctgaagcatgagaaaccaccacagtagctttagaatagatgcggtcatattcttctttggcttctggttcttccagccctcatggttggcatcacatatgcctgcatgccattaacaccagctggccctacccctataatgatcctgtgtcctaaattaatatacaccagtggttcctcctccctgttaaagactaatgctcnnnnnnnnnnnnnnnatatttatattctagtctcactctcttgtcccacccttcttctcttccccattcccaactccagctaaaatatgggaagggagaacccccaataaaactgccatg

SEQ ID NO: 4927 - DNA, 53 bp, Homo sapiens
tcggattcagctggtagggaaagactctgcacctgctgtcttagggaagaaat

SEQ ID NO: 4928 - DNA, 531 bp, Homo sapiens
  misc_feature (240)..(240): n includes a, c, g, or t, or contains no nucleotide
  misc_feature (298)..(298): n includes a, c, g, or t, or contains no nucleotide
gccggtccctctgctggggatgcaccaatgaaccccacaggaagggggaaggaaggagggaatttcacattcccttgttctagattcactttaacgcttaatgccttcaaagttttggtttttttaagaaaaaaaaatatatatatatttgggttttgggggaaaagggaaatttttttttctctttggttttgataaaatgggatgtgggagtttttaaatgctatagccctgggcttnccccatttggggcagctatttaaggggaggggatgtctcaccgggctgggggtgaganatccccccaccccagggactccccttccctctggctccttccccttttctatgaggaaataagatgctgtaactttttggaacctcagttttttgattttttatttgggtaggttttggggtccaggccattttttttaccccttggaggaaataagatgagggagaaaggaaaaggggaggaaacttctcccctcccaccttcacctttagcttcttgaaaatgggcccctg

SEQ ID NO: 4929 - DNA, 361 bp, Homo sapiens
  misc_feature (113)..(132): n includes a, c, g, or t, or contains no nucleotide
tgactttagctgatactcttatgtacgagatctgtctctgctgtttaacttcattggattaatcagctggtttcaactctactgcgaaacaaaaatagctccttaaaagtacnnnnnnnnnnnnnnnnnnnntagttatctaatcaagacacctcattcaaacaaaacctgccttaggaaaatttaatatattttaaattattttaaaagaaatacaacatcttattctttagctttcttaatcggtgctttatggaggccagtgtaacgttacatgactcgttgagaaagttgaggaatttcctctaccacctttgttgcttgaagaaaaacatgtcttttcaaaatgagaggctttcat

SEQ ID NO: 4930 - DNA, 47 bp, Homo sapiens
gaaagttgcattctgctgtttgcttggacaccgtaccactgaacaaa

SEQ ID NO: 4931 - DNA, 300 bp, Homo sapiens
  misc_feature (49)..(65): n includes a, c, g, or t, or contains no nucleotide
  misc_feature (72)..(72): n includes a, c, g, or t, or contains no nucleotide
  misc_feature (144)..(167): n includes a, c, g, or t, or contains no nucleotide
agctcaagtcccagtggaacaatgataatccccttttcaagagcgccannnnnnnnnnnnnnnnncccaagntttgctgagagttaggagcacttggtgaagacaaggccgtcaggacccaccatgtctgccccatcacgcggnnnnnnnnnnnnnnnnnnnnnnnncttgaggatgtcaccaattaaccagaaatccagttattttccgccctcaaaatgacagccatggccggccgggtgcttctgggggctcgtcggggggacagctccactctgactggcacagtctttgcatgga

SEQ ID NO: 4932 - DNA, 102 bp, Homo sapiens
cattaccaaaagcagggaacaaagctcttattcaactgcgaattccatagtgggctctggcttttcttgaatagatatcacaaggttgcttattatcaaaag

SEQ ID NO: 4933 - DNA, 506 bp, Homo sapiens
  misc_feature (35)..(49): n includes a, c, g, or t, or contains no nucleotide
ttcttagaaccaagggaaatactgctccccccatnnnnnnnnnnnnnnntctcatgggctcacctgggcccaaggcacagccagggcacagttaggcctggatgtttgcctggtccgtgagatgccgcgggtcctgtttccttactggggatttcagggctgggggttcagggagcatttccttttcctgggagttatgaccgcgaagttgtcatgtgccgtgcccttttctgtttctgtgtatcctattgctggtgactctgtgtgaactggcctttgggaaagatcagagagggcagaggtggcacaggacagtaaaggagatgctgtgctggccttcagcctggacagggtctctgctgactgccaggggcgggggctctgcatagccaggatgacggctttcatgtcccagagacctgttgtgctgtgtattttgatttcctgtgtatgcaaatgtgtgtatttaccattgtgtagggggctgtgtctgatcttggtgttca

SEQ ID NO: 4934 - DNA, 378 bp, Homo sapiens
  misc_feature (192)..(193): n includes a, c, g, or t, or contains no nucleotide
  misc_feature (244)..(262): n includes a, c, g, or t, or contains no nucleotide
  misc_feature (292)..(293): n includes a, c, g, or t, or contains no nucleotide
gaaacaatagctagctgcgagcgacaggcagcccaggacatctgtcttaggctccagtggacccccgtgcctcctaaggcttgagtgcaggtacccgtgttcctagagcacaggacgctgtctgcggctccccatcttccctgccagctccagcctgaactcaaggactgttaagaccactccactgatccnnaaagctgttgatgacaagttgattcatttaaaacttctgtacatgcattcnnnnnnnnnnnnnnnnnnnaattaaaattaaaaattaagttaaatttannaataatcatctaatttctatacattctaaaatatattcagcatctgtagtttatactttgtttctccaaagtatgtgggtaaaca

SEQ ID NO: 4935 - DNA, 480 bp, Homo sapiens
atgcatgtgagaggagatggaccctggtattactatgagacaattgacaaggaacttattgatcattctccgaaagcaactcctgacaattaagcatttttttctccaaatacaaagtatattctctttattggaaaataaattaataaatatattctgtatttttgctctccgtgaaaaacaaaagagcctctgacattactgtctctcagtgttggttcagattgaggcttttgtttgaggagtttggcttccagtccccaaagaaggtttaaaatgtactaataaaaactggagaaataggaatttgtgaactcctaaaattgtagcaactttgaaaggttagtgttttatttacctgacaaatggaagttatagaagtctaataatgttaagcaccagtaattatagtattttgtacaaatgcctgtactgtagatgtctgtattattgaggggcaactcaggattttaagttcca

SEQ ID NO: 4936 - DNA, 513 bp, Homo sapiens
  misc_feature (118)..(162): n includes a, c, g, or t, or contains no nucleotide
  misc_feature (165)..(172): n includes a, c, g, or t, or contains no nucleotide
  misc_feature (175)..(180): n includes a, c, g, or t, or contains no nucleotide
  misc_feature (182)..(183): n includes a, c, g, or t, or contains no nucleotide
  misc_feature (185)..(202): n includes a, c, g, or t, or contains no nucleotide
  misc_feature (270)..(270): n includes a, c, g, or t, or contains no nucleotide
agaaggggcacgatagaaggccataggaatgaaagtaaatcattcaggtgaagtgagaaattcttccatatacagagtgaaaatgtgtgatttcattcctgccttcctttaaacgttnnnnnnnnnnnnnnnnnnnnnnnnnnnnnnnnnnnnnnnnnnnnncannnnnnnngannnnnncnncnnnnnnnnnnnnnnnnnngtatttacatttgccttcccaagttgagaatagaatgtggtgttctgtgctttctgtttttattattnccaaaatatttttttaaagaagtgttatttttcaacagattcataaattagttcctgatgtacggtaaattaaaactcccactgtgtcagtcaaactgagatgtgctcatttcataaccactcatttctagtctgtcagagctgcactggtggcttattgctggtttttaaaggtgtttttaacttacatgtaacatgtttaggacatgttttttttttctaatttgtgtgtctttacaactg

SEQ ID NO: 4937 - DNA, 470 bp, Homo sapiens
  misc_feature (88)..(88): n includes a, c, g, or t, or contains no nucleotide
  misc_feature (170)..(170): n includes a, c, g, or t, or contains no nucleotide
actgagcaggtagtggggcaaattcctgccctctctctctggcctctgggccgtttggtagtaatcacccaggggctggtaaagcccntcctcttggcacctcagaatcacagtgttactgatcagggatgtgaggctgctgttgggggtggggggaggggaatgggcangcaagccagtcttctgtcttcctttgctaacttagggttttgagcaggttggggtatggtgcctgtcatacccacctgccaccctgggaacctcactgttctctctttcagcctagacctgctgatccagggtgtgtgtgagttgagggtgggtggaggggtttgcagtgtgggaatgtggccctgcagttgacctgagctgcttcacatggttgtccattctggggcttaaagaactgggaccagaccaagtagaggccttggtgctggttggggtggggcctgcagagtcttagttac

SEQ ID NO: 4938 - DNA, 552 bp, Homo sapiens
  misc_feature (43)..(43): n includes a, c, g, or t, or contains no nucleotide
  misc_feature (93)..(93): n includes a, c, g, or t, or contains no nucleotide
  misc_feature (464)..(478): n includes a, c, g, or t, or contains no nucleotide
cttcttgatacagtgaataatgtcttcaagaaatatcaatacnagaaccgcagggcacttgaacaccaaaagaaagaatttgtaaagtactcnaaaagtttcagtgatactctgaaaacgtattttaaagatggcaaggcaataaatgtgttcgtaagtgccaaccgactaattcatcaaaccaacttaatacttcagaccttcaaaactgtggcctgaaagttgtatatgttaagagatgtacttctcagtggcagtattgaactgcctttatctgtaaattttaaagtttgactgtataaattatcagtccctcctgaagggatctaatccaggatgttgaatgggattattgccatcttacaccatatttttgtaaaatgtagcttaatcataatctcacactgaagattttgcatcacttttgctattatcattcttttaagaattataagccaaaagannnnnnnnnnnnnnntgtcattatataacattccttaaaagaattgtaaatattggtgtttgtttctgacattttaacttgaaagcgat

SEQ ID NO: 4939 - DNA, 421 bp, Homo sapiens
  misc_feature (66)..(66): n includes a, c, g, or t, or contains no nucleotide
  misc_feature (70)..(70): n includes a, c, g, or t, or contains no nucleotide
  misc_feature (76)..(76): n includes a, c, g, or t, or contains no nucleotide
  misc_feature (80)..(80): n includes a, c, g, or t, or contains no nucleotide
  misc_feature (85)..(85): n includes a, c, g, or t, or contains no nucleotide
  misc_feature (87)..(87): n includes a, c, g, or t, or contains no nucleotide
  misc_feature (89)..(89): n includes a, c, g, or t, or contains no nucleotide
  misc_feature (93)..(94): n includes a, c, g, or t, or contains no nucleotide
  misc_feature (132)..(148): n includes a, c, g, or t, or contains no nucleotide
gtgaagatcctcaaagacttccctgaggaggacgaccccaccaactggctgcgttgctactactangaanacaccntcancaccntnangganntcgcggtggaggaagatctcagcagcactcccctattnnnnnnnnnnnnnnnnntcacaaggcgggagttccagagagaggacatagctctgaattaccgggacgctgagggggatctggttcggctgctgtcggatgaggacgtagcgctcatggtgcggcaggctcgtggcctcccctcccagaagcgcctcttcccctggaagctgcacatcacgcagaaggacaactacagggtctacaacacgatgccatgagctgacggtgtccctggagcagtgaggggacaccagcaaaaaccttcagctctcagaggagattgggacc

SEQ ID NO: 4940 - DNA, 571 bp, Homo sapiens
  misc_feature (346)..(350): n includes a, c, g, or t, or contains no nucleotide
  misc_feature (352)..(356): n includes a, c, g, or t, or contains no nucleotide
  misc_feature (367)..(367): n includes a, c, g, or t, or contains no nucleotide
  misc_feature (450)..(480): n includes a, c, g, or t, or contains no nucleotide
tcctcctgtgtatgaaataacaagcctagaggaatgaactagtgctactgaactgtttaaattatttttgtgttaatagtacactttgagtatctttttccacattaaaaactttctgaattataaatgttttccttacattatttaacaatgtacactgttaaaaataaaaataaaaattcaaactttgggggtttctcagcagccgttaattgtacattttgcactaactctgggtgttgcgcttcttgtaagattgcgctttgtgcttcagtttgttacctttgtagacttatttaatgaaaccattcaaataaaccaaacttgcttttgttgaaaaaaaaannnnnannnnnagaagattccntcacattctcattggcactattttgagttaagtgcaatttataactggatccctaattcctgggagctcctttgctgtctccnnnnnnnnnnnnnnnnnnnnnnnnnnnnnnngccggctagtactttcagacttccttatctcaggttcacagcttcccaaatgggtctgagccaaaaaataggaagtcactgcttcaagatt

SEQ ID NO: 4941 - DNA, 561 bp, Homo sapiens
  misc_feature (51)..(51): n includes a, c, g, or t, or contains no nucleotide
  misc_feature (72)..(72): n includes a, c, g, or t, or contains no nucleotide
  misc_feature (75)..(75): n includes a, c, g, or t, or contains no nucleotide
  misc_feature (119)..(119): n includes a, c, g, or t, or contains no nucleotide
  misc_feature (174)..(189): n includes a, c, g, or t, or contains no nucleotide
  misc_feature (197)..(197): n includes a, c, g, or t, or contains no nucleotide
  misc_feature (205)..(233): n includes a, c, g, or t, or contains no nucleotide
  misc_feature (349)..(363): n includes a, c, g, or t, or contains no nucleotide
cacagaaccggaaacttagagacaaagttcggagccccgcccccgccgcgngccgctgagttgtctggcccngcngacccacggcccacgacccaccgacccacgaatcggcccggccntcgcgtgcaccatgtctggctcctccagcgtcgccgctatgaagaaagtggttcnnnnnnnnnnnnnnnnaggccggnctcaaccnnnnnnnnnnnnnnnnnnnnnnnnnnnnnttgaaacagttctgtctgcagaatgctcaacatgaccctctgctgactggagtatcttcaagtacaaatcccttcagaccccagaaagtctgttcctttttgtagtaaaatgaatnnnnnnnnnnnnnnncaaaccactccttatgatccagtgaatattcaagagagctacatttgaagcctgtacaaaagcttatccctgtaacacatgtgccataatatacaaacttctactttcgtcagtccttaacatctacctctctgaattttcatgaatttctatttcacaagggtaattgttttatatacactggcagcagcatacaat

SEQ ID NO: 4942 - DNA, 563 bp, Homo sapiens
  misc_feature (41)..(41): n includes a, c, g, or t, or contains no nucleotide
  misc_feature (44)..(44): n includes a, c, g, or t, or contains no nucleotide
  misc_feature (47)..(47): n includes a, c, g, or t, or contains no nucleotide
  misc_feature (97)..(98): n includes a, c, g, or t, or contains no nucleotide
  misc_feature (167)..(167): n includes a, c, g, or t, or contains no nucleotide
  misc_feature (180)..(180): n includes a, c, g, or t, or contains no nucleotide
  misc_feature (218)..(218): n includes a, c, g, or t, or contains no nucleotide
  misc_feature (300)..(300): n includes a, c, g, or t, or contains no nucleotide
  misc_feature (314)..(314): n includes a, c, g, or t, or contains no nucleotide
  misc_feature (512)..(512): n includes a, c, g, or t, or contains no nucleotide
ccagcatgccaatgtacaggcgcacagcagcctcatccgtnacntgnagcagctgggaggcactgtcaccaaccccgggggctcggggacctccagnncggctggagccgagagaacgcatggagcccacctatcagctgtcccgctggaccccggtcatcaaggangtaatggaggacnccgtggaggaccggctggacaggaacctgtggcccttngtatccgaccccgcccccacggccagctcccaggccgctgtcagtgcccgcttcggtcactggcacaagaacaaggctggcntagaagcccgggcnggcccccggctcatcgtgtatgtcatgggcggtgtggccatgtcagagatgagggccgcctacgaggtgaccagggccaccgagggcaagtgggaggtgctcattggctcctcacacatcctcaccccgacccgcttcctggatgacctgaaggcactggacaagaagctggaggacattgccctgccctgacccctngccccgccccctacccctccctttccagagaaataaactcttcccgtcgct

SEQ ID NO: 4943 - DNA, 356 bp, Homo sapiens
  misc_feature (245)..(274): n includes a, c, g, or t, or contains no nucleotide
cccggagtgcttatcttaaaattgcagatttagggagcctgccaatttaacagtctcatcaggtgattcttttcaacagtaatgtttgagaattactgggttaaattgtgggaaagggtccagattttaaaggtgctttaaggttgccctctgccgatactgtttgtctttctactgtttcatcccctaacttcccccaaccctcaaattaaaactagaactatagatccacatgaacgcacgcnnnnnnnnnnnnnnnnnnnnnnnnnnnnnngtggattgcctaggaaagcaagtcatatggccattgatagttctcatgtaattagttttgctcaccactagtacagatgacc

SEQ ID NO: 4944 - DNA, 181 bp, Homo sapiens
ttgcttgctaaagaagtggtctcctgaggtcttaagacattcctgacagtgtcttgagtgggtgggagagaggttgctgtcattgcgctgtggaatttcacagatgagaaccacgcctagccaaaatcacttttcctgtttgcctcagtgacacagctgcagggaccctcgtggatgttgt

SEQ ID NO: 4945 - DNA, 415 bp, Homo sapiens
ctgctacccgctgggcatctgtgctgaacggaccgctatccagaaggccgtctcagaagggtacaaggatttcagggcaattgctatcgccagtgacatgcaagatgattttatctctccatgtggggcctgcaggcaagtcatgagagagtttggcaccaactggcccgtgtacatgaccaagccggatggtacgtatattgtcatgacggtccaggagctgctgccctcctcctttgggcctgaggacctgcagaagactcagtgacagccagagaatgcccactgcctgtaacagccacctggagaacttcataaagatgtctcacagccctggggacacctgcccagtggccccagcctacagggactgggcaaagatgatgtttccagattacactccagcctgagtcag

SEQ ID NO: 4946 - DNA, 555 bp, Homo sapiens
  misc_feature (154)..(154): n includes a, c, g, or t, or contains no nucleotide
  misc_feature (200)..(200): n includes a, c, g, or t, or contains no nucleotide
  misc_feature (367)..(368): n includes a, c, g, or t, or contains no nucleotide
  misc_feature (371)..(376): n includes a, c, g, or t, or contains no nucleotide
  misc_feature (453)..(460): n includes a, c, g, or t, or contains no nucleotide
  misc_feature (488)..(529): n includes a, c, g, or t, or contains no nucleotide
gacaatgccggcagcctgagcccaggcaccccagtgcccgctgggcccagcctggggacagggaacctgccgggctcacagtgtgggagcagctggacaccaggcttcttggtgaaccggcgaggggccgagtcccgcctggtgggcatttgcngccgcctccccaccaccagtcactgcctcgcagagccctacactcncgcagccgctcctcagaggcctgtgcccatcgcaggcctgggaggaaagtgggcgcagagccctcctgctcacacagctgctgagacttcagggacccatcagaacttggtgcagcacagccccgcccgtggagggtcccttttacgcaccccaaggcccacacctnngcnnnnnngtagccctcatccagggaagttttgcgatcctttaggaagacactgtcctcttattacagattgtgtatttccgtannnnnnnnagtagcagctttgtacactgaggacacnnnnnnnnnnnnnnnnnnnnnnnnnnnnnnnnnnnnnnnnnncagtcatcctgcctctgatgtgaatc

SEQ ID NO: 4947 - DNA, 495 bp, Homo sapiens
  misc_feature (53)..(53): n includes a, c, g, or t, or contains no nucleotide
  misc_feature (74)..(74): n includes a, c, g, or t, or contains no nucleotide
  misc_feature (140)..(167): n includes a, c, g, or t, or contains no nucleotide
gatccagcaggaaacagttacttgcagaatgtgtatgcgcctgaagatgatcntgagatgaaggtggagcgttncaagcgcacctttgaccaaaatgaggagctagggctcaatgacatgaagacagagggctatgaggnnnnnnnnnnnnnnnnnnnnnnnnnnnnggtggctcaagggccagcctccagcgctgctctttctgtaggttatttattagtattggatgaaggcgaaggctgggagtgtctttcccaccagcccttgcccatggtggggaggacatctggtctgagtcagagatctgtgcacactttctaaacagcttgtgatgcaagtgtgagcctattgtgttacttgaccttattttggaagttttgaattggcctaggaggaaacccagaaatgaaccaggggtatgtcatcacttttttcatatcaagtcctcaccctccttccacataatgctctatcctctaaggttggaactctgaa

SEQ ID NO: 4948 - DNA, 422 bp, Homo sapiens
  misc_feature (30)..(35): n includes a, c, g, or t, or contains no nucleotide
  misc_feature (37)..(43): n includes a, c, g, or t, or contains no nucleotide
  misc_feature (47)..(47): n includes a, c, g, or t, or contains no nucleotide
  misc_feature (49)..(50): n includes a, c, g, or t, or contains no nucleotide
  misc_feature (52)..(52): n includes a, c, g, or t, or contains no nucleotide
  misc_feature (55)..(55): n includes a, c, g, or t, or contains no nucleotide
  misc_feature (57)..(57): n includes a, c, g, or t, or contains no nucleotide
  misc_feature (96)..(96): n includes a, c, g, or t, or contains no nucleotide
  misc_feature (115)..(115): n includes a, c, g, or t, or contains no nucleotide
  misc_feature (166)..(166): n includes a, c, g, or t, or contains no nucleotide
cctgctcagtcctggggtccgagatgctannnnnncnnnnnnnaggnanntngtntnagggccaggtttcctgaaaggcgggagtcagacctccgncccccagccagagcaagcnttggggcaccatgcccaggagggaagaagccatccacagccttccctgtcnaccggctcctctgtcctgcctaccctggtcctggcgggacttcactatttgacttggtttcctttcagatattcttggctcagggcctgggttgagggagcttagggaaggacgtccgtctgggtgcttttcctccagtttgctggctggcttctccgtctacccacagtgacctcacagagaggccctcctgccacccatgctcatgtggtgtccccaccgcccacttgtttgatgtcactgactgtctacatgt

SEQ ID NO: 4949 - DNA, 362 bp, Homo sapiens
  misc_feature (326)..(326): n includes a, c, g, or t, or contains no nucleotide
taagggcttaacctgtgactttaataagctggaacagtccactgaatgggtataatgaattgcagtatatacgtatgattgctttttaagtgattatcttttcttctgttaagtcatgtaaattcataaatccttttgcactgatgtgttgaaccttattcttgtacattcattcaatcaaggcaaacttttataatttttcttttgtttccaatgaccttgaaatgttatagcatggtaatattctatgcaactatagttatactttttggtttgacactgtattttttcacattgatttactggttgatgatagattttataanctaacggttctcatgcggtgcgtaattgtagatgca

SEQ ID NO: 4950 - DNA, 476 bp, Homo sapiens
  misc_feature (81)..(82): n includes a, c, g, or t, or contains no nucleotide
  misc_feature (84)..(100): n includes a, c, g, or t, or contains no nucleotide
  misc_feature (364)..(369): n includes a, c, g, or t, or contains no nucleotide
  misc_feature (371)..(375): n includes a, c, g, or t, or contains no nucleotide
  misc_feature (377)..(381): n includes a, c, g, or t, or contains no nucleotide
  misc_feature (393)..(423): n includes a, c, g, or t, or contains no nucleotide
tgtacactaacaccagcatggacctgcttttcattgtgtctgaaatgtgagccacgtagtgtcggcctgctgtgaagttannannnnnnnnnnnnnnnnnttctacagaaataatttcaatttttttcagtatttagtagtgaaagatattaatacattaatggtaatacatttctggtttaatataaattaaggatgttttctagttgtgcatgaatgctggcaacttagtaagttttgacaattgtttaaatatgtaatgttaagcttaggtttaaaaaagtaaagctggtaaactgggtctttgtcatttgctttaaaaaaaaaaaaaaagaaaataaatgcgaatgtgttggtgcattcnnnnnnannnnnannnnnaaaaaaaaaaannnnnnnnnnnnnnnnnnnnnnnnnnnnnnnaaactactaggacagaaatgcaacagagatcttaaaatggttcttgctgaaac

SEQ ID NO: 4951 - DNA, 473 bp, Homo sapiens
  misc_feature (26)..(100): n includes a, c, g, or t, or contains no nucleotide
  misc_feature (102)..(110): n includes a, c, g, or t, or contains no nucleotide
  misc_feature (132)..(132): n includes a, c, g, or t, or contains no nucleotide
tgagtcctgtgtggagagttacctcnnnnnnnnnnnnnnnnnnnnnnnnnnnnnnnnnnnnnnnnnnnnnnnnnnnnnnnnnnnnnnnnnnnnnnnnnnntnnnnnnnnncctcactgaggtggtatgaagnttcactaatgtatgtagcgtgtttgtcaatcctccagtgaaaagcactatctagatcacattttggatcacattagccaaatgcagtaaatggccaaattagatgtgtgctgaagacaatcagtcactgggtctatattaaacagcaaccagagcaacaaatggcaaacaatttctattttcaagtttctttgcatatttttttggtgcaaaaccatttataaacttttttttctaacactagtgtctacagcagcattcaaaaaaattctgttaccttttctgtattaggatttaaagtctatttcttattgtatacctgattgaagctgttcttggaga

SEQ ID NO: 4952 - DNA, 218 bp, Homo sapiens
  misc_feature (45)..(45): n includes a, c, g, or t, or contains no nucleotide
  misc_feature (54)..(54): n includes a, c, g, or t, or contains no nucleotide
  misc_feature (82)..(82): n includes a, c, g, or t, or contains no nucleotide
  misc_feature (95)..(95): n includes a, c, g, or t, or contains no nucleotide
  misc_feature (104)..(104): n includes a, c, g, or t, or contains no nucleotide
  misc_feature (113)..(113): n includes a, c, g, or t, or contains no nucleotide
  misc_feature (125)..(125): n includes a, c, g, or t, or contains no nucleotide
  misc_feature (144)..(144): n includes a, c, g, or t, or contains no nucleotide
  misc_feature (146)..(146): n includes a, c, g, or t, or contains no nucleotide
  misc_feature (165)..(165): n includes a, c, g, or t, or contains no nucleotide
  misc_feature (181)..(182): n includes a, c, g, or t, or contains no nucleotide
  misc_feature (187)..(187): n includes a, c, g, or t, or contains no nucleotide
agatggtaaccatactctattccataaccctcatgtgaatccacnttccaactnggctacgaagatgaataaagagaatctnggaccactacccngggcaccangggaccacnagcactggtttnggaccgttactctgcacantnggaccagaaaaagtatatngggaccttaagctcannccttnctttacttgtatcaaatgatgactggtatac

SEQ ID NO: 4953 - DNA, 76 bp, Homo sapiens
tatttttcttttcactctctttctaatgcttcccaccttaccttttagattcttttgctaggtgggagattgttat

SEQ ID NO: 4954 - DNA, 80 bp, Homo sapiens
acttgtcttgttcaccttgggatgacgccgcatgatatgtcagggcgtgggacatctagtaggtgcttgacataatttca

SEQ ID NO: 4955 - DNA, 210 bp, Homo sapiens
  misc_feature (71)..(72): n includes a, c, g, or t, or contains no nucleotide
  misc_feature (75)..(75): n includes a, c, g, or t, or contains no nucleotide
  misc_feature (96)..(96): n includes a, c, g, or t, or contains no nucleotide
  misc_feature (100)..(121): n includes a, c, g, or t, or contains no nucleotide
cctcgagctctgtagcctggtctgtgcattgtggctgtcaaatccatgtgtcccccctgtggtctgtgtgnnacnccaccactgtgtcccagtgtntggnnnnnnnnnnnnnnnnnnnnnntctggcctatgaccctgtgcccacttgtccatgtgcttactgtgaaccctgtgcctgtgtttcatgttctgtgtcacgtgaccctgtgc

SEQ ID NO: 4956 - DNA, 501 bp, Homo sapiens
  misc_feature (222)..(257): n includes a, c, g, or t, or contains no nucleotide
  misc_feature (302)..(302): n includes a, c, g, or t, or contains no nucleotide
  misc_feature (375)..(375): n includes a, c, g, or t, or contains no nucleotide
  misc_feature (382)..(382): n includes a, c, g, or t, or contains no nucleotide
  misc_feature (402)..(402): n includes a, c, g, or t, or contains no nucleotide
agacgatgacttgcaaaatgtcgcagctggaacgcaacatagagaccatcatcaacaccttccaccaatactctgtgaagctggggcacccagacaccctgaaccagggggaattcaaagagctggtgcgaaaagatctgcaaaattttctcaagaaggagaataagaatgaaaaggtcatagaacacatcatggaggacctggacacaaatgcagacaagnnnnnnnnnnnnnnnnnnnnnnnnnnnnnnnnnnnnaggctaacctgggcctcccacgagaagatgcacgagggtgacganggccctggccaccaccataagccaggcctcggggagggcaccccctaagaccacagtggccaagatcacagtngccacgnccacggccacagtcatggtngccacggccacagccactaatcaggaggccaggccaccctgcctctacccaaccagggccccggggcctgttatgtcaaactgtcttggctgtggggct

SEQ ID NO: 4957 - DNA, 573 bp, Homo sapiens
  misc_feature (399)..(402): n includes a, c, g, or t, or contains no nucleotide
  misc_feature (405)..(408): n includes a, c, g, or t, or contains no nucleotide
  misc_feature (417)..(422): n includes a, c, g, or t, or contains no nucleotide
  misc_feature (424)..(426): n includes a, c, g, or t, or contains no nucleotide
cctttttgtctaagatctattgagaaagggaaatatgggaaggagaaccatttgatcagaatacaaccaatagtctttaagcattgttaaagtatgaaactgaaatacattcaaaacacttaatccttgaggcttgtgatctgagtaattagcaggtatgatgctgggactggaaaatagaaagtaataactaaagggttaatgtgcaacgttattttttggccttgttcatgattttatgttttcagtgtcctgtgtacatatagaattgttaaagttgtcatttccaatatttatattagaaaaattatttagatactttataattttaaccggcatttttaataatgacacttgcatttattgtattgtaataaatttcacttttaactttaaaannnnaannnnaaaaaaaannnnnnannntgccttgcctgaaaagataacaaaaatgagagaatttcttgatgttttaaaatgggcagttttgagcaataatctgtcctaacagaacagtagcaataagttttaggataccatcttgaatgtctagttggtgtgcaatagcttttc

SEQ ID NO: 4958 - DNA, 169 bp, Homo sapiens
ggggctcatttcaaacttattttctagccactcctcccagctcttctgtgctgtccacttgggaagctaaggctctcaaaacgggcatcacccagttgacccatctctcagcctctctgagcttggaagaagcctgttctgagcctcaccctatcagtcagtagagaga

SEQ ID NO: 4959 - DNA, 268 bp, Homo sapiens
  misc_feature (84)..(84): n includes a, c, g, or t, or contains no nucleotide
  misc_feature (86)..(86): n includes a, c, g, or t, or contains no nucleotide
  misc_feature (97)..(97): n includes a, c, g, or t, or contains no nucleotide
  misc_feature (183)..(183): n includes a, c, g, or t, or contains no nucleotide
atgctgcgtcagttcacagggaaccccaacattccaaaacctcggcgaatcttgcgctcggcctggggcagcaacccttacttncncggctcctatncatacacacaggtgggctccagcggggcggaaatgtggagaagctggccaagcccctgccgttacacagagagctcaaagacagcncccatgcaggtgctgttttccggtgaggccacccaccgcaagtactattccaccacccacggtgctctgctgtccggccagcgtg

SEQ ID NO: 4960 - DNA, 490 bp, Homo sapiens
  misc_feature (51)..(51): n includes a, c, g, or t, or contains no nucleotide
  misc_feature (54)..(70): n includes a, c, g, or t, or contains no nucleotide
  misc_feature (360)..(360): n includes a, c, g, or t, or contains no nucleotide
ccaaagtgaagtcacccagagactacagtaactttgaccaggagttcctgnacnnnnnnnnnnnnnnnnncctacagcgacaagaacctcatcgactccatggaccagtctgcattcgctggcttctcctttgtgaaccccaaattcgagcacctcctggaagattgaggttcctggacagatcaggctagccctgccctccacccacacctgcccgctccccacgataagcaccagtgggactgtggtgacttctgctgctggccccgcccctgcccccagagcgtccttggctgccgtctggccgggctctcatggtacttcctctgtgaactgtgtgtgaatctgcttttcctctgncttcggagggaaattgtaaatcctgtgtttcattacttgaatgtagttatctattgaaaatatatattatatacatagacatatatatatatataataggctgtatatattgctcagtagagaaaaacca

SEQ ID NO: 4961 - DNA, 310 bp, Homo sapiens
  misc_feature (194)..(219): n includes a, c, g, or t, or contains no nucleotide
  misc_feature (244)..(266): n includes a, c, g, or t, or contains no nucleotide
  misc_feature (270)..(270): n includes a, c, g, or t, or contains no nucleotide
  misc_feature (285)..(285): n includes a, c, g, or t, or contains no nucleotide
ttctcaaatatcgtttacacgttggtaactataatggcacagctggagatgcattacgtttcaacaaacattacaaccacgatctgaagtttttcaccactccagataaagacaatgatcgatatccttctgggaactgtgggctgtactacagttcaggctggtggtttgatgcatgtctttctgcaaacttnnnnnnnnnnnnnnnnnnnnnnnnnnacagaggtgtccgtaatgggatttnnnnnnnnnnnnnnnnnnnnnnnagtnaggcacaccctggtngctacaagtcctccttcaaagaggc

SEQ ID NO: 4962 - DNA, 78 bp, Homo sapiens
tggccttagggcacccactgggctgcactggggcacgacaggtcatcacgctgctcaatgagctgaagcgccgtggga

SEQ ID NO: 4963 - DNA, 210 bp, Homo sapiens
  misc_feature (27)..(27): n includes a, c, g, or t, or contains no nucleotide
  misc_feature (144)..(159): n includes a, c, g, or t, or contains no nucleotide
ctgagctcgccgtggcagatgccatgnctcaggacgttcatgtggatggtttcatgtcatcgtgctggcaacttgtcctccctgccttagagatgaggctcagacaaacgaccttagcacccatagcctatgccatgagcactnnnnnnnnnnnnnnnncccagctcctccccttagtgaccccaagtctgtttccctcagctgcataag

SEQ ID NO: 4964 - DNA, 306 bp, Homo sapiens
  misc_feature (177)..(209): n includes a, c, g, or t, or contains no nucleotide
  misc_feature (231)..(231): n includes a, c, g, or t, or contains no nucleotide
  misc_feature (236)..(236): n includes a, c, g, or t, or contains no nucleotide
  misc_feature (251)..(251): n includes a, c, g, or t, or contains no nucleotide
tgattattttcaaggccctcagcatatttgtatagttgcttgcctgatataaatgcaatattaatgcctttaaagtatgaatctatgccaaagatcacttgttgttttactaaagaaagattacttagaggaaataagaaaaatcatgtttgctctcccggttcttccagtggtttnnnnnnnnnnnnnnnnnnnnnnnnnnnnnnnnnttttctccaatatcagtgctcnagacncagtgaagcaaattnaaaaaaaaaaaaaaaaaaaatccctgaatgatgattagagacatcaccgctaaaa

SEQ ID NO: 4965 - DNA, 601 bp, Homo sapiens
tttgaagagggtgcagcccagatgagcttggggcagagggcgaagctgacctgcacccctgatgtggcatatggagccacgggccaccccggtgtcatccctcccaatgccaccctcatctttgacgtggagctgctcaacttagagtgaaggcaggaaggaactcaaggtggtggctggagatggctgctgctcaccctcctagcctgctctgccactgggacggctcctgcttttggggctcttgatcagtgtgctaacctcactgcctcatggcatcatccattctctctgcccaagttgctctgtatgtgttcgtcagtgttcatgcgaattcttgcttgaggaaacttcggttgcagattaagcatttcaggttgtgcattttgtgtgatgcatgtagtagcctttcctgataacagaacacagatctcttgttcgcacaatctacactgccttaccttcacttaaaccacacacacaaggtgctcagacatgaaatgtacatggcgtaccgtacacagagggacttgagccagttacctttgctgtcactttctctcttataaattctgttagctgctcacttaaacaatgtcct

SEQ ID NO: 4966 - DNA, 456 bp, Homo sapiens
  misc_feature (324)..(341): n includes a, c, g, or t, or contains no nucleotide
tttaaatgccctttctgcagttggaaggttttctttatatactattcccaccatggggagcgaaaacgttaaaatcacaaggaattgcccaatctaagcagactttgccttttttcaaaggtggagcgtgaataccagaaggatccagtattcagtcacttaaatgaagtcttttggtcagaaattacctttttgacacaagcctactgaatgctgtgtatatatttatatataaatatatctatttgagtgaaaccttgtgaactctttaattagagttttcttgtatagtggcagagatgtctatttctgcattcaaaagtnnnnnnnnnnnnnnnnnnatgctaaactttttataaaagtttagttgtaaacttaacccttttatacaaaataaatcaagtgtgtttattgaatggtgattgcctgctttatttcagaggaccagtgctttga

SEQ ID NO: 4967 - DNA, 236 bp, Homo sapiens
  misc_feature (26)..(74): n includes a, c, g, or t, or contains no nucleotide
  misc_feature (149)..(149): n includes a, c, g, or t, or contains no nucleotide
gggataaacccctgaaggatgtgatnnnnnnnnnnnnnnnnnnnnnnnnnnnnnnnnnnnnnnnnnnnnnnnnngccaaggagtagggcacagggacatctttctttgagtgaccgtctgtgcaggccctgtagtccgccacagggctntgagctgcactggccccggtgctggcatctggtggagcggacccactcccctcacattccacaggcccatggactcacttttgtaac

SEQ ID NO: 4968 - DNA, 333 bp, Homo sapiens
tgcctgttagtgattgtttcacatgtgtaacgttttggttgagatgttaaatggtggacgagtactgtggatgtgaatgtgggaagtaattttaatcatatgtaattggtcacaaggcctaatttgcagtaactattgctgttttatttaacaatgccttgttgctttgtatgcattaatgtttggatgtaaagattgtgtgtctatccaacagggagccacagtatttaaattgaccaacctaatgttacaactactttgaggtggccaaatgtaaactaaaagccttaattaaagtggtgcaattttgtataacttagcatcagtagttca

SEQ ID NO: 4969 - DNA, 421 bp, Homo sapiens
  misc_feature (40)..(57): n includes a, c, g, or t, or contains no nucleotide
  misc_feature (139)..(139): n includes a, c, g, or t, or contains no nucleotide
  misc_feature (198)..(218): n includes a, c, g, or t, or contains no nucleotide
  misc_feature (259)..(259): n includes a, c, g, or t, or contains no nucleotide
tctttggtcttctcgacaggtgccctttctcttaccactnnnnnnnnnnnnnnnnnncacccaaacacatggcacttggaagaaaaagacccactgaatctgagaaagtactttctggtggcaaatgaatttatcattntagtatagttttcgataaaggatatagcaacatcttttgataattgtgctttacaactnnnnnnnnnnnnnnnnnnnnnatttggatgtgagtttaatcttttcagccttgtaaatgggnaaatatatattaaaattgattgtcaaatacagcatttctttggaaaccaccttaaaacattagtgctatggttatgagtgtatgtgccagtacttaccagtcaatgcattgtggatatgagctttcgttgactgcttctctgcagtcgttgatgctaataaa

SEQ ID NO: 4970 - DNA, 580 bp, Homo sapiens
  misc_feature (242)..(252): n includes a, c, g, or t, or contains no nucleotide
tttcaaagccaagacctcacacacacaaaaaatgcacaaacaatgcaatcaacagaaaagctgtaaatgtgtgtacagttggcatggtagtatacaaaaagattgtagtggatctaatttttaagaaattttgcctttaagttattttacctgtttttgtttcttgttttgaaagatgcgcattctaacctggaggtcaatgttatgtatttatttatttatttatttggttcccttcctannnnnnnnnnngctgctgccctagttttctttcctcctttcctcctctgacttggggaccttttgggggagggctgcgacgcttgctctgtttgtggggtgacgggactcaggcgggacagtgctgcagctccctggcttctgtggggcccctcacctacttacccaggtgggtcccggctctgtgggtgatggggaggggcattgctgactgtgtatataggataattatgaaaagcagttctggatggtgtgccttccagatcctctctggggctgtgttttgagcagcaggtagcctgctggttttatctgagtgaaatactgtacaggggaataa

SEQ ID NO: 4971 - DNA, 325 bp, Homo sapiens
  misc_feature (53)..(53): n includes a, c, g, or t, or contains no nucleotide
  misc_feature (83)..(83): n includes a, c, g, or t, or contains no nucleotide
  misc_feature (121)..(121): n includes a, c, g, or t, or contains no nucleotide
  misc_feature (185)..(185): n includes a, c, g, or t, or contains no nucleotide
  misc_feature (207)..(223): n includes a, c, g, or t, or contains no nucleotide
agcagccatactgatgaccacagcaaccagctccacggcctgatgcagccccntcccagcctctcccgctaggagagtcctcnttctaagcaaagtgcccctgcaggccgggttctgccgnccaggactgcccccttcccagagccctgtacatcccagactgggcccagggtctcccatagacnagcctgggggcaagttagcacnnnnnnnnnnnnnnnnntcctgaatggggtggcctggccccttctctgcttaaagaatgccctttatgatgcactgattccatcccaggaacccaacagagctcaggacagcccacagg

SEQ ID NO: 4972 - DNA, 342 bp, Homo sapiens
  misc_feature (98)..(99): n includes a, c, g, or t, or contains no nucleotide
  misc_feature (101)..(103): n includes a, c, g, or t, or contains no nucleotide
  misc_feature (213)..(213): n includes a, c, g, or t, or contains no nucleotide
  misc_feature (215)..(215): n includes a, c, g, or t, or contains no nucleotide
  misc_feature (217)..(222): n includes a, c, g, or t, or contains no nucleotide
  misc_feature (224)..(224): n includes a, c, g, or t, or contains no nucleotide
  misc_feature (246)..(246): n includes a, c, g, or t, or contains no nucleotide
tggtaagcaacctgggcatcttaggaagcagtccctggagaaggcatgttcccagaaaggtctctggagggacaaactcactcagtaaaacataatgnntnnnatcatgaagaaaactgattctctatgacatgaaatgaaaattttaatgcattgttataattactaatgtacgctgctgcaggacattaataaagttgcttttttaggctnanannnnnncngatgccataatcagaacacacntttttttcctctttctcccagcttcaaatgcaaattcatcattgggctcacttctaataactgcagtgtttcccgccttgggcttgcagcagaaaa

SEQ ID NO: 4973 - DNA, 560 bp, Homo sapiens
agaacagcagctacttcgtggagtggatccccaacaacgtgaaggtggccgtgtgtgacatcccgccccgcggcctcaagatgtcctccaccttcatcgggaacagcacggccatccaggagctgttcaagcgcatctccgagcagttcacggccatgttccggcgcaaggccttcctgcactggtacacgggcgagggcatggacgagatggagttcaccgaggccgagagcaacatgaacgacctggtgtccgagtaccagcagtaccaggacgccacggccgaggaagagggcgagatgtacgaagacgacgaggaggagtcggaggcccagggccccaagtgaaactgctcgcagctggagtgagaggcaggtggcggccggggccgaagccagcagtgtctaaacccccggagccatcttgctgccgacaccctgctttccccatcgccctagggctcccttgccgccctcctgcagtatttatggcctcgtcctcccccacctaggccacgtgtgagctgctcctgtctctgtcttattgcagctccaggcctg

SEQ ID NO: 4974 - DNA, 500 bp, Homo sapiens
  misc_feature (27)..(42): n includes a, c, g, or t, or contains no nucleotide
  misc_feature (82)..(82): n includes a, c, g, or t, or contains no nucleotide
  misc_feature (98)..(98): n includes a, c, g, or t, or contains no nucleotide
  misc_feature (131)..(131): n includes a, c, g, or t, or contains no nucleotide
  misc_feature (134)..(134): n includes a, c, g, or t, or contains no nucleotide
  misc_feature (137)..(137): n includes a, c, g, or t, or contains no nucleotide
  misc_feature (141)..(141): n includes a, c, g, or t, or contains no nucleotide
  misc_feature (144)..(146): n includes a, c, g, or t, or contains no nucleotide
  misc_feature (149)..(163): n includes a, c, g, or t, or contains no nucleotide
  misc_feature (194)..(194): n includes a, c, g, or t, or contains no nucleotide
  misc_feature (202)..(202): n includes a, c, g, or t, or contains no nucleotide
  misc_feature (403)..(456): n includes a, c, g, or t, or contains no nucleotide
gtctggacctcaggaggcagagaaatnnnnnnnnnnnnnnnnagaagatggtgagatttttgcaagtattaaccagaaggancggtatggtcagtttnccatgataaccctgaaaaatataataacccagnccntgnttcntannnttnnnnnnnnnnnnnnnaagtgcattgagctggatgagcggctgaaanccatgganccaggagatcacagtgaaccctcagtttgtacaaaagagtatgggctcacaagaagatgattcaggaaacaaaccatccagttattcttgaaactaacatccatcctgagctaaacaagagaaactaccatcttggccagtgacaagtgttcggagggcagcagagaggaccaagcctgtgtcacctggagactaagaaannnnnnnnnnnnnnnnnnnnnnnnnnnnnnnnnnnnnnnnnnnnnnnnnnnnnnctgcaaagaaaggaaacagatttgcaaactttaaagtctgtcgt

SEQ ID NO: 4975 - DNA, 450 bp, Homo sapiens
  misc_feature (373)..(374): n includes a, c, g, or t, or contains no nucleotide
  misc_feature (376)..(380): n includes a, c, g, or t, or contains no nucleotide
ttgttgcctacctagctgcatctataatgtcagcttatcctaaggctgtccacgtacttaatttacttaagtgttcattttaagtaacgtgctcactgtgtataggaatttgtattttggaggtgcttgatctatctacaaagaaaaattaattaggaattactttattataaaatgctcctagaagtcttaattgtgtttattttttaaaaaaacaaatgttagacttgtgtgcatggaagtaattaaggtacatcattattgtagtttgaaagttgtacatgataagacattttgtttttactgtatgtttttactgaatgatctattccccatcccaaggcaagcatgaataaaattaggttaaacgtannannnnncatcgcagtctcttagaatttgtttcatctattttattttattgaatactgtctgtatctttggttatcc

SEQ ID NO: 4976 - DNA, 41 bp, Homo sapiens
gtaccctcgtatgcaggtgactgtgtttgacctcccagaca

SEQ ID NO: 4977 - DNA, 462 bp, Homo sapiens
  misc_feature (26)..(26): n includes a, c, g, or t, or contains no nucleotide
  misc_feature (246)..(262): n includes a, c, g, or t, or contains no nucleotide
agccagggtcggtgaaggatcccaanatggctgggcgaaaacttgctctaaaaaccattgactgggtagcttttgcagagatcataccccagaaccaaaaggccattgctagttccctgaaatcctggaatgagaccctcacctccaggttggctgctttacctgagaatccaccagctatcgactgggcttactacaaggccaatgtggccaaggctggcttggtggatgactttgagaagaagnnnnnnnnnnnnnnnnntcccgtgccagaggataaatatactgcccaggtggatgccgaagaaaaagaagatgtgaaatcttgtgctgagtgggtgtctctctcaaaggccaggattgtagaatatgagaaagagatggagaagatgaagaacttaattccatttgatcagatgaccattgaggacttgaatgaagctttcccagaaaccaaattag

SEQ ID NO: 4978 - DNA, 507 bp, Homo sapiens
  misc_feature (27)..(27): n includes a, c, g, or t, or contains no nucleotide
  misc_feature (99)..(100): n includes a, c, g, or t, or contains no nucleotide
  misc_feature (120)..(120): n includes a, c, g, or t, or contains no nucleotide
  misc_feature (318)..(339): n includes a, c, g, or t, or contains no nucleotide
agtgttcttggttccaggcacctcccnggctcacggggagctcagaggtccatgccgaggagaccaggcaggacctcccgaggctgcgccccggccggnncccatgcgttttgtgatccnaagtgactctgtgggaagggtggggacgaggcgtcgggagggtatacagggagcccctcccgtgcatggctgcccccccgttcattttctccaccacagccgcttgcacgtatagatactgtggtcccctttcttttaatatataaattatgtatggtgaagtggagtgtattgtgtaggtcccgtatttaatgcctnnnnnnnnnnnnnnnnnnnnnncctctgtggcccgcagccccctgagcctggctgttgtgtggtatttatgctctctttgtctgcctgtttctaaggaaatgcatgtgtgccctgagccgtgatgatcctcccatccgtgttgtgagcacaggcatttgtgtctggtctgtcctccctgttgattggtct

SEQ ID NO: 4979 - DNA, 175 bp, Homo sapiens
  misc_feature (117)..(131): n includes a, c, g, or t, or contains no nucleotide
attgatgctcaccttgttgctctagcagagagagactaaacattgtcgttagtttaccagatccgtgatgccacttacctgtgtgtttggtaacaacaaaccaacatcatggaggtnnnnnnnnnnnnnnnggagcctctcccactcctcctaccaccgaagtggttaggactct

SEQ ID NO: 4980 - DNA, 414 bp, Homo sapiens
  misc_feature (273)..(287): n includes a, c, g, or t, or contains no nucleotide
agaataacaagaagcccagtggtgaggaaagtgcgttctcccagcactgcctcctgttttctccctctcatgtccctccagggaaaatgactttattgcttaatttctgcctttcccccctcacacatgcacttttgggcctttttttatagctggaaaaaacaaaataccaccctacaaacctgtatttaaaaagaaacagaaatgaccacgtgaaatttgcctctgtccaaacatttcatccgtgtgtatgtgtatgtgtgtgagtgtgtnnnnnnnnnnnnnnntctttttatatggggttgttgtctcattttggtctgttttggtcccctccctcgtgggcttgtgctcgggatcaaacctttctggcctgttatgattctgaacatttgacttgaaccacaagtgaat

SEQ ID NO: 4981 - DNA, 596 bp, Homo sapiens
agaggcagcgaactcatctttgccagtacaggagcttgtgccgtggcccacagcccacagcccacagccatgggctgggacctgacggtgaagatgctggcgggcaacgaattccaggtgtccctgagcagctccatgtcggtgtcagagctgaaggcgcagatcacccagaagattggcgtgcacgccttccagcagcgtctggctgtccacccgagcggtgtggcgctgcaggacagggtcccccttgccagccagggcctgggccctggcagcacggtcctgctggtggtggacaaatgcgacgaacctctgagcatcctggtgaggaataacaagggccgcagcagcacctacgaggtccggctgacgcagaccgtggcccacctgaagcagcaagtgagcgggctggagggtgtgcaggacgacctgttctggctgaccttcgaggggaagcccctggaggaccagctcccgctgggggagtacggcctcaagcccctgagcaccgtgttcatgaatctgcgcctgcggggaggcggcacagagcctggcgggcggagctaagggcctccaccagcatccgagcaggatca

SEQ ID NO: 4982 - DNA, 535 bp, Homo sapiens
tgttacacgctgcttgtagacatgttaatatagtaatacctttatgatatattgagtttaaggactactctttttctgttttatcatgtatgcattattttgtatatgtacagggcaagtaggtatataatttgataaagttgcaattgaaatattattaacagaagatgtaagaaatttctgcatggtctaaatctttgtgtactttatttgtaaattatttgccctggagttttagaaaatagtttctgaattttaaacttgctggattcatgcagccagctttgcaggttatcagagatcaaagattgtaataataattttgtaaattgtaagcaaaaagttatttttatattatatacagtctaattgttcatcctaattgttcctgttttcatctagtcagagattcagtaagtgccttggaacaatattgaattctcttagcttgtgtgtgtttctttaatatttgaactcaagtgggattagaagactatcaaaatacatgtatgtttcagatatttgacctgtcatt

SEQ ID NO: 4983 - DNA, 382 bp, Homo sapiens
  misc_feature (26)..(44): n includes a, c, g, or t, or contains no nucleotide
  misc_feature (141)..(141): n includes a, c, g, or t, or contains no nucleotide
  misc_feature (144)..(173): n includes a, c, g, or t, or contains no nucleotide
ctcggcaagagactgcctcagtttgnnnnnnnnnnnnnnnnnnnaaagaaaaagaagaaaacccgaggtgatcattttaaacttcgcttccgaaaaaactttcaggccctgttggaggagcagaacttgagtgtggccganggnnnnnnnnnnnnnnnnnnnnnnnnnnnnnnacccccatcgcggccccagcgccccttctgtgctgtctgtggcttcccatccccctacacctgtgtcagctgcggtgcccggtactgcactgtgcgctgtctggggacccaccaggagaccaggtgtctgaagtggactgtgtgagcctgggcattcccagagaggaagggccgctgtgcactgcccggccttcagaaagacagaattt

SEQ ID NO: 4984 - DNA, 505 bp, Homo sapiens
acgccgagatgaccacacggatggtggcgtccaagatggagctacacgcgttatctacgggccgcgagccccgcgtggccacggtcactcgcatcctgcgccagacgctcttcaggtaccagggccacgtgggtgcatcgctgatcgtgggcggcgtagacctgactggaccgcagctctacggtgtgcatccccatggctcctacagccgtctgcccttcacagccctgggctctggtcaggacgcggccctggcggtgctagaagaccggttccagccgaacatgacgctggaggctgctcaggggctgctggtggaagccgtcaccgccgggatcttgggtgacctgggctccgggggcaatgtggacgcatgtgtgatcacaaagactggcgccaagctgctgcggacactgagctcacccacagagcccgtgaagaggtctggccgctaccactttgtgcctggaaccacagctgtcctgacccagacagtgaagccact

SEQ ID NO: 4985 - DNA, 158 bp, Homo sapiens
aaatcaagtgtgtttattgaatggtgattgcctgctttatttcagaggaccagtgctttgatttttattatgctatgttataactgaacccaaataaatacaagttcaaatttatgtagactgtataagattataataaaacatgtctgaagtcaaaa

SEQ ID NO: 4986 - DNA, 261 bp, Homo sapiens
  misc_feature (46)..(46): n includes a, c, g, or t, or contains no nucleotide
  misc_feature (49)..(49): n includes a, c, g, or t, or contains no nucleotide
  misc_feature (57)..(73): n includes a, c, g, or t, or contains no nucleotide
  misc_feature (121)..(136): n includes a, c, g, or t, or contains no nucleotide
  misc_feature (138)..(138): n includes a, c, g, or t, or contains no nucleotide
acctcacgtgccagggagacttgaatgtggctgtcactcttccggnacnccaagggnnnnnnnnnnnnnnnnntggcactacccaccccgtgtgacagaataggagccagcgactcaggannnnnnnnnnnnnnnnanggcaacgcctgaagtcagacctccctataggtcaacagggacaacctggggatctctggagcagggccctcctctctcaggcttggcccactcccccagacacctggacacgtggccacaaat

SEQ ID NO: 4987 - DNA, 500 bp, Homo sapiens
  misc_feature (376)..(387): n includes a, c, g, or t, or contains no nucleotide
  misc_feature (391)..(391): n includes a, c, g, or t, or contains no nucleotide
  misc_feature (394)..(399): n includes a, c, g, or t, or contains no nucleotide
  misc_feature (401)..(414): n includes a, c, g, or t, or contains no nucleotide
  misc_feature (417)..(418): n includes a, c, g, or t, or contains no nucleotide
  misc_feature (420)..(420): n includes a, c, g, or t, or contains no nucleotide
gcagtcgttccatctttcctgatcatagcaagaaatgcagtgtctgcctgttacagcaaaagaaacaaatcatgatttcttttctaatgttatcacctgagtcaaggaaacatgttacgccttcttgttgtaggaaaaacggcttgcagattataaagagacatttggttgatattcattaatggccccatggacttaaagtgatcaggccctaaaacgttgttgtgatgaggtttctttagcaagttcttgtttaaattatcatttatttgatgagtgaagtttttaacatgctttgctgtgtgaaatttaaaaaagggatgtttttccaggctggaacaataaatgtggctgtgcagtttaaaaaaaaaaaaannnnnnnnnnnnaaanaannnnnnannnnnnnnnnnnnnaannanaactcttgtacataaagtacagaaatttaagctcacatgtatttggacaaattatagtttagtagactagctctatgtgc

SEQ ID NO: 4988 - DNA, 583 bp, Homo sapiens
acatccttggaaattgggaagagcacaagaggagatccagggcaaggccattgggatattctgaaacttgaatattttgttttgtgcagagataaagaccttttccatgcaccctcatacacagaaaccaattttcttttttatactcaatcatttctagcgcatggcctggttagaggctggttttttctcttttcctttggtccttcaaaggcttgtagttttgggtagtccttgttctttggaaatacacagtgctgaccagacagcctccccctgtcccctctatgacctcgccctccacaaatgggaaaaccagactacttgggagcaccgcctgtgaaataccaacctgaagacacggttcattcaggcaacgcacaaaacagaaaatgaaggtggaacaagcacatatgttcttcaactgtttttgtctacactctttctcttttcctctacatgctgaaggctgaaagacaggaaagatggtgccatcagcaaatattattcttaattgaaaacttgaaatgtgtatgtttcttactaatttttaaaaatgtattccttgccagggcaggcaagg

SEQ ID NO: 4989 - DNA, 153 bp, Homo sapiens
gggctcggtggacgggcccagggtgggagcggccggcccacctgtcccctcgggaggggagctgagcccgacttctaccggggtcccccagcttccggactggccgcaccccggaggagccacgggggcgctgctgggaacgtgggcgggggg

SEQ ID NO: 4990 - DNA, 560 bp, Homo sapiens
  misc_feature (106)..(106): n includes a, c, g, or t, or contains no nucleotide
  misc_feature (124)..(124): n includes a, c, g, or t, or contains no nucleotide
  misc_feature (135)..(135): n includes a, c, g, or t, or contains no nucleotide
  misc_feature (137)..(151): n includes a, c, g, or t, or contains no nucleotide
  misc_feature (185)..(185): n includes a, c, g, or t, or contains no nucleotide
  misc_feature (247)..(247): n includes a, c, g, or t, or contains no nucleotide
  misc_feature (249)..(249): n includes a, c, g, or t, or contains no nucleotide
  misc_feature (251)..(251): n includes a, c, g, or t, or contains no nucleotide
  misc_feature (253)..(253): n includes a, c, g, or t, or contains no nucleotide
  misc_feature (262)..(262): n includes a, c, g, or t, or contains no nucleotide
  misc_feature (265)..(265): n includes a, c, g, or t, or contains no nucleotide
ctgacttcaacaaaatgtatgagttatacgatccatgtactgtcatgtttttcttcagttaccatagaggttggtgaattagctacatgagcattagaccattctnccaaaggtggagcctccntactcggaacnannnnnnnnnnnnnnnacttggggactggcaacaacaacaagattaactngggccatggaggacaagcaggagatggtggacatcatcgagacggtgtaccgcggggcccgnanangncgcggcctnggntggtgtcccccaaggactactccaccaagtaccgctactgaggcgccctcagtctgcgcggataaatgtcgtggagccctttttgtatggaaacgttttaagctatttaaagcctttggaaaatacaggaagctccagggctggagcacctctgagatggaattgataacatggtcttaactcaccgaaataaacaagcacgtggtgagaggagcaggcctacttgtttgttctcaggaaacttaatgaatagattactgattttcctagtcaaagttaattcttacccttggag

SEQ ID NO: 4991 - DNA, 511 bp, Homo sapiens
  misc_feature (90)..(90): n includes a, c, g, or t, or contains no nucleotide
  misc_feature (298)..(298): n includes a, c, g, or t, or contains no nucleotide
  misc_feature (347)..(400): n includes a, c, g, or t, or contains no nucleotide
  misc_feature (448)..(448): n includes a, c, g, or t, or contains no nucleotide
tggagcccatcatcctctccgtgggcgaggaagatgaggtctccatcaaggaggcagccgaggcggtggtggaggccatggacttccatnggggaagtcacctttgatacaaccaagtcggatgggcagtttaagaagacagccagtaacagcaagctgaggacctacctgcccgacttccggttcacacccttcaagcaggcggtgaaggagacctgtgcttggttcactgacaactacgagcaggcccggaagtgaagctggaagacaggatcaggtgccagcggaccatcggctngcagagcccagcggccaccacccgtcaaccctgccaggagctgagggcnnnnnnnnnnnnnnnnnnnnnnnnnnnnnnnnnnnnnnnnnnnnnnnnnnnnnntccagtggggcccccattcacgttggtcctcagggaaaccagggtccngggcaggcccggcgctttgctccccacaccagccccctgcgcgtgtccactctgatcctgcat

SEQ ID NO: 4992 - DNA, 336 bp, Homo sapiens
  misc_feature (34)..(34): n includes a, c, g, or t, or contains no nucleotide
  misc_feature (148)..(169): n includes a, c, g, or t, or contains no nucleotide
tgctagagtcaacttactctgttgctggctttancagagaataggaggaaccatatgaaaaagatcaggctttctgacttccatccccaaaacacatttaccagcatactccaaactgtttctgatgtgttccatgagaaaaggattnnnnnnnnnnnnnnnnnnnnnnatactacacactccctttctccttctggagatcaacccacattagagtgtctaaggactcctgagaattcctgttacagtaaacaaaactaacgtaatctaccatttcctacactatttgagcatggaaatcatagtccccactctgtgaaaacttaacgctttttg

SEQ ID NO: 4993 - DNA, 251 bp, Homo sapiens
  misc_feature (129)..(143): n includes a, c, g, or t, or contains no nucleotide
gctgttacctcttgaaatatgatttatttagattgctaatcccactcattcaggaaatgccaagaggtattccttggggaaatggtgcctcttacagtgtaaatttttcctcctttacctttgctaatnnnnnnnnnnnnnnnttcttatcccttgtgaggcagttgttgactgagtttttcatccttacaatcctgtcccatggtatttaacataaaaaaaaataaaactgttaacagattcttgctcga

SEQ ID NO: 4994 - DNA, 449 bp, Homo sapiens
  misc_feature (36)..(36): n includes a, c, g, or t, or contains no nucleotide
  misc_feature (52)..(52): n includes a, c, g, or t, or contains no nucleotide
  misc_feature (82)..(115): n includes a, c, g, or t, or contains no nucleotide
  misc_feature (122)..(149): n includes a, c, g, or t, or contains no nucleotide
  misc_feature (226)..(226): n includes a, c, g, or t, or contains no nucleotide
  misc_feature (315)..(329): n includes a, c, g, or t, or contains no nucleotide
cgcacgcagttctcagggctgcgcagggacctgccnccctcggtgcacctgntcacgctggccagctggggccccgaaatgnnnnnnnnnnnnnnnnnnnnnnnnnnnnnnnnnngagaggnnnnnnnnnnnnnnnnnnnnnnnnnnnntaccttgaacttgagggacctgttctccaccttcaccatcacccgcctgcaggagaccacgctggtggccaaccagntccgcgaggcagcctccaggctcaagtggacaacaaacacaggccccacaccccaccaaactccgtaccagctggacccggccaacatnnnnnnnnnnnnnnnggaaatccgcactttcctggcctcagttcaatggaaggaggtggatggttaggtctgctgggatgggccctccaagcccaagcctcctgctccgggggcagaccagactctgactctcct

SEQ ID NO: 4995 - DNA, 361 bp, Homo sapiens
gtgtctggtgactgaagtacaggtcgtgcagaaaacttgagactggggttcagggcttgtgggggtctgcctcaatctccctggccgggccaggcgcctgcacagactggctgctggacctgcgcacgcagcccaggaatggacattcctaacgggtggtgggcatgggagatgcctgtgtaatttcgtccgaagctgccaggaagaagaacagaactttgtgtgtttatttcatgataaagtgatttttttttttttaacccactcactggtcccggtctctggattcagccccattcctccaacactactagagagactgtttccccggttttttttttggggagatggagtcacgatc

SEQ ID NO: 4996 - DNA, 493 bp, Homo sapiens
ccaggctggcttagaaccccatagagtcctagcatcaccgaggacgtggctgctctgacaccacctagggcaacctacttgttttacagatggggcaaaaggaggcccagagctgatctctcatccgctctggccccaagcactatttcttccttttccacttaggcccctacatgcctgtagccctttctcactccatccccacccaaaagtgctcagaccttgtctagttatttataaactgtatgtacctccctcacttctctcctatcactgctttcctactctccttttatctcactctagtccaggtgccaagaatttcccttctaccctctattctcttgtgtctgtaagttacaaagtcaggaaaagtcttggctggacccctttcctgctgggtggatgcagtggtccaggactggggtctgggcccaggtttgagggagaagtttgcagagcacttcccacctctctgaatagtgtgtatgtg

SEQ ID NO: 4997 - DNA, 88 bp, Homo sapiens
gcgcacggcccaggttatcttgtagcatagcaacttcggatttcactctacccggagagtttcccgcttggttgaacacattggcctc

SEQ ID NO: 4998 - DNA, 265 bp, Homo sapiens
  misc_feature (85)..(86): n includes a, c, g, or t, or contains no nucleotide
  misc_feature (95)..(95): n includes a, c, g, or t, or contains no nucleotide
  misc_feature (133)..(133): n includes a, c, g, or t, or contains no nucleotide
cctagttctcacgaggaccctttcttgcccacagtttcgagaggcccgtgccatgagaccgcctggggtgagcaaggcgacctgnnctgctgccngaaggtttggccgccgcgggacacctgtttccttcccncagtgtctgcgtccgcacagcatacccagctcggacctcctaggacagagactcagcgaacccttgctgggaaccgctgagctgaagttcttggaaggctcccacccaggtgccccgttggaaagcagatat

SEQ ID NO: 4999 - DNA, 513 bp, Homo sapiens
  misc_feature (90)..(146): n includes a, c, g, or t, or contains no nucleotide
  misc_feature (178)..(188): n includes a, c, g, or t, or contains no nucleotide
  misc_feature (364)..(364): n includes a, c, g, or t, or contains no nucleotide
  misc_feature (397)..(397): n includes a, c, g, or t, or contains no nucleotide
cgcaccatgctggttaggaagatccaggaagagtcactgaggacctacctcttcacctacagcagtgtctatgactccatcagcatggannnnnnnnnnnnnnnnnnnnnnnnnnnnnnnnnnnnnnnnnnnnnnnnnnnnnnnnntcagcaaaatgatcattaatgaggagctgatnnnnnnnnnnnggcctccctggaccagccaacacagacagtggtgatgcaccgcactgagcccactgcccagcagaacctggctctgcagctggccgagaagctgggcagcctggtggagaacaacgaacgggtgtttgaccacaagcagggcacctacgggggctacttccgagaccagaaggacnggctaccgcaaaaacgagggctacatgcgccgncggtggctaccgccagcagcagtctcagacggcctactgagctctccactctgtttcccgcctgggccatccaaccttgaagtcctaaaccacacctcagtcactaaaggtctgtt

SEQ ID NO: 5000 - DNA, 510 bp, Homo sapiens
  misc_feature (86)..(86): n includes a, c, g, or t, or contains no nucleotide
  misc_feature (88)..(88): n includes a, c, g, or t, or contains no nucleotide
  misc_feature (91)..(91): n includes a, c, g, or t, or contains no nucleotide
  misc_feature (96)..(98): n includes a, c, g, or t, or contains no nucleotide
  misc_feature (101)..(101): n includes a, c, g, or t, or contains no nucleotide
  misc_feature (103)..(110): n includes a, c, g, or t, or contains no nucleotide
  misc_feature (113)..(114): n includes a, c, g, or t, or contains no nucleotide
  misc_feature (116)..(117): n includes a, c, g, or t, or contains no nucleotide
  misc_feature (119)..(119): n includes a, c, g, or t, or contains no nucleotide
  misc_feature (122)..(138): n includes a, c, g, or t, or contains no nucleotide
  misc_feature (251)..(267): n includes a, c, g, or t, or contains no nucleotide
ggctcgtactccatcaatttcgttcaaaatccaaataataacagataacaaagataacaaaagctttacaagctgacttggaattntntgntgctnnntgntnnnnnnnnggnnanngnccnnnnnnnnnnnnnnnnnttaaaagcatcttatctaaaagaaaggctatccagtagagcccagtgctcccttgtccctcttttatgatcagggtgaaatgtacttcctgatgtaatgaacctaatttgatnnnnnnnnnnnnnnnnngtctgtgcagctggtgtccccgattctggctgtcctatgtccaggaagaagcccatttgttgaggctgaccttcctgatcatacacacacacagcccagcaaaagcctctcctgaaccaaacaaacctgttggttgggagactgcccagacatgattgatgacgggttcccgcctgctgtcccctccctgatcacacagctaacgaggctgcctccagcatttcctgatttcctctgtggtaa

SEQ ID NO: 5001 - DNA, 535 bp, Homo sapiens
cgtcagactctggagtgagaatcatagctgagcccggcagatactatgttgcatcagctttcacgcttgcagttaatatcattgccaagaaaattgtattaaaggaacagacgggctctgatgacgaagatgagtcgagtgagcagacctttatgtattatgtgaatgatggcgtctatggatcatttaattgcatactctatgaccacgcacatgtaaagccccttctgcaaaagagacctaaaccagatgagaagtattattcatccagcatatggggaccaacatgtgatggcctcgatcggattgttgagcgctgtgacctgcctgaaatgcatgtgggtgattggatgctctttgaaaacatgggcgcttacactgttgctgctgcctctacgttcaatggcttccagaggccgacgatctactatgtgatgtcagggcctgcgtggcaactcatgcagcaattccagaaccccgacttcccacccgaagtagaggaacaggatgccagcaccctgcctgtgtcttgtgc

SEQ ID NO: 5002 - DNA, 102 bp, Homo sapiens
gtaactctttggctattgtccttgtgtatcctgacagcgccatgtgtgtcagcccatgtcaatcaagatgggtgattatgaaatgccagacttctaaaataa

SEQ ID NO: 5003 - DNA, 557 bp, Homo sapiens
  misc_feature (26)..(26): n includes a, c, g, or t, or contains no nucleotide
  misc_feature (60)..(60): n includes a, c, g, or t, or contains no nucleotide
  misc_feature (132)..(132): n includes a, c, g, or t, or contains no nucleotide
  misc_feature (150)..(186): n includes a, c, g, or t, or contains no nucleotide
  misc_feature (189)..(189): n includes a, c, g, or t, or contains no nucleotide
  misc_feature (192)..(192): n includes a, c, g, or t, or contains no nucleotide
gtagcatcatgtcagggcttcctggnactcagtacacctctcagtttgtcttttaaaaancagctgaatctttactacctatttagttctccttgttaaagaaacaggggtgggaataaaatggatttaggnacacccagtttgaattgnnnnnnnnnnnnnnnnnnnnnnnnnnnnnnnnnnnnngtnccnagcttaatggagtaggctgtccttggcacttgcatgtgtgaaaggagggttttgcctcttcttgagcatggcttgagttggtaaggaaagctgtaactcacgaagccctgagacctgctacccctaagatcgagcttgttttcagtgactggcttgagtcataggaggaggagtctggtacagctgcaggagagcagggccatctgaagcggtagcattgccaccatctccctctcatctagagcagttttcttatgccttggtttgagctgaatttgatgtgaattcttttgctgcttaataaagtgacctctaggtgcattagaatgcgaaggcaaatagttgcaataaatcacctgcacaag

SEQ ID NO: 5004 - DNA, 57 bp, Homo sapiens
acccgggagcagtgtcctgtgctttctgcatgcttagagcatgttcttggaacatgg

SEQ ID NO: 5005 - DNA, 290 bp, Homo sapiens
  misc_feature (29)..(43): n includes a, c, g, or t, or contains no nucleotide
  misc_feature (46)..(63): n includes a, c, g, or t, or contains no nucleotide
  misc_feature (184)..(206): n includes a, c, g, or t, or contains no nucleotide
  misc_feature (209)..(209): n includes a, c, g, or t, or contains no nucleotide
tctactgataggcaggttaccatcactgnnnnnnnnnnnnnnnttnnnnnnnnnnnnnnnnnnatcaatgtcaggctttcctcggagacgggtggcatggggagcagctagaacaatgcagattcatccataatccctttctgctgttcaccaccacccatgatccatctgtgtagtttctgannnnnnnnnnnnnnnnnnnnnnnaantagtttgtaaattttcagtttctacacactttatcatccactcgtgattttttaattaaagcgttttaattcctttctctg

SEQ ID NO: 5006 - DNA, 472 bp, Homo sapiens
  misc_feature (52)..(52): n includes a, c, g, or t, or contains no nucleotide
  misc_feature (59)..(59): n includes a, c, g, or t, or contains no nucleotide
  misc_feature (83)..(83): n includes a, c, g, or t, or contains no nucleotide
  misc_feature (90)..(90): n includes a, c, g, or t, or contains no nucleotide
  misc_feature (95)..(95): n includes a, c, g, or t, or contains no nucleotide
  misc_feature (103)..(107): n includes a, c, g, or t, or contains no nucleotide
  misc_feature (246)..(294): n includes a, c, g, or t, or contains no nucleotide
actgtatcaaacaatgtcagtgctttatttaataattctcttctgtatcatnggcattngtctacttgcttattacattgtcnattatgncattngtaatttnnnnngtaatatgcattatttgccagttttattatataggctatggacctcatgtgcatatagaaagacagaaatctagctctaccacaagttgcacaaatgttatctaagcattaagtaattgtagaacataggactgctaannnnnnnnnnnnnnnnnnnnnnnnnnnnnnnnnnnnnnnnnnnnnnnnnatttcctcatacttttgatactacttgtacctgtatgtcttttagaaagacattggtggagtctgtatcccttttgtatttttaatacaataattgtacatattggttatatttttgttgaagatggtagaaatgtactatgtttatgcttctacatccagtttgtacaagctggaaa

SEQ ID NO: 5007 - DNA, 507 bp, Homo sapiens
  misc_feature (59)..(59): n includes a, c, g, or t, or contains no nucleotide
  misc_feature (79)..(122): n includes a, c, g, or t, or contains no nucleotide
  misc_feature (158)..(197): n includes a, c, g, or t, or contains no nucleotide
  misc_feature (257)..(257): n includes a, c, g, or t, or contains no nucleotide
  misc_feature (404)..(426): n includes a, c, g, or t, or contains no nucleotide
ccccgcaggcgctgtgctagagatggccgtgggtgccctgcaccatgaccctgagcacnggccaagcccggagaccttnnnnnnnnnnnnnnnnnnnnnnnnnnnnnnnnnnnnnnnnnnnnccttcacgtacctgcccttcggggccggcccacggnnnnnnnnnnnnnnnnnnnnnnnnnnnnnnnnnnnnnnnntgacactgctccacgtgctgcacaagttccggttccaagcctgccctgagacccaggtancgctgcagctagaatccaaatctgccctaggtccaaaaaatggtgtctatatcaagatcgtatcccgctgacacagaaggctgccgggtggggggagggcacccccaaattcaaagaaaaccctaagtgtggatgttcagaattttnnnnnnnnnnnnnnnnnnnnnnngaaagagtgcctggcatgcaaggataagaggttctttacataacatttcctaaatgcttaataaacgtttgttgcacttgg

SEQ ID NO: 5008 - DNA, 42 bp, Homo sapiens
ccttgcaccctcattgctgttcagattaaagcctctgttttg

SEQ ID NO: 5009 - DNA, 464 bp, Homo sapiens
  misc_feature (87)..(111): n includes a, c, g, or t, or contains no nucleotide
  misc_feature (122)..(122): n includes a, c, g, or t, or contains no nucleotide
caatccttagcaatgccttagctgggacgcatagctaatactttagagaggatgacagatccataaagagagtaaagataagagaannnnnnnnnnnnnnnnnnnnnnnnnaaaaaaaaaanctatttttgtacaaatgtaattttatccctcatgtatacttggatatggcggggggagggctgggactgtttcgtttctgcttctagagattgaggtgaaagcttcgtccgagaaacgccaggacagacgatggcagaggagagggctcctgtgacggcggcgaggcttgggaggaaaccgccgcaatgggggtgtcttccctcggggcaggagggtgggcctgaggctttcaagggttttcttccctttcgagtaatttttaaagccttgctctgttgtgtcctgttgccggctctggccttcctgtgactgactgtgaagtggcttctccgtacgattgt

SEQ ID NO: 5010 - DNA, 383 bp, Homo sapiens
  misc_feature (64)..(79): n includes a, c, g, or t, or contains no nucleotide
  misc_feature (312)..(313): n includes a, c, g, or t, or contains no nucleotide
agtttgcttctacatgatgctaaaggctgcgaatgggatcctgatggaactaaggactccaatnnnnnnnnnnnnnnnnctgcattcctttttcttcacttacaagaaaggcctgaatggaggacttttctgtaaccaggaacattttttaggggtcaaagtgctaataattaactcaaccaggtctactttttaatggctttcataacactaactcataaggttaccgatcaatgcatttcatacggatatagacctagggctctggagggtgggggattgttaaaacacatgcaaaaaaaaaaaaaaaanngaaattttgtatatataaccattttaatcttttataaagttttgaatgttcatgtatgaatgctgcagct

SEQ ID NO: 5011 - DNA, 392 bp, Homo sapiens
  misc_feature (26)..(26): n includes a, c, g, or t, or contains no nucleotide
  misc_feature (44)..(64): n includes a, c, g, or t, or contains no nucleotide
  misc_feature (146)..(181): n includes a, c, g, or t, or contains no nucleotide
  misc_feature (307)..(347): n includes a, c, g, or t, or contains no nucleotide
ataatccataccttgaagaagttggnccaatgatattatatacnnnnnnnnnnnnnnnnnnnnntcattccttgagtcaacttcagggtcttggatactaaagagaaggagaactgtggttaatgttttggatcatcatttgtgannnnnnnnnnnnnnnnnnnnnnnnnnnnnnnnnnnnacttaaggtagccatctggatcataagaaggtcctgcagttgagacaaaatgacccaagtgtattttccacaagttttgatcctgtgtaatatttctttttccttccctagtgtatgtagatacannnnnnnnnnnnnnnnnnnnnnnnnnnnnnnnnnnnnnnnnttttgtgattgctttcccgtctctagtagtattctgttgtgtcta

SEQ ID NO: 5012 - DNA, 553 bp, Homo sapiens
gactctgcaaggagaacattgaacacaacagcacaacatccaccttctgtggcacgccggagtatctcgcacctgaggtgcttcataagcagccttatgacaggactgtggactggtggtgcctgggagctgtcttgtatgagatgctgtatggcctgccgcctttttatagccgaaacacagctgaaatgtacgacaacattctgaacaagcctctccagctgaaaccaaatattacaaattccgcaagacacctcctggagggcctcctgcagaaggacaggacaaagcggctcggggccaaggatgacttcatggagattaagagtcatgtcttcttctccttaattaactgggatgatctcattaataagaagattactcccccttttaacccaaatgtgagtgggcccaacgagctacggcactttgaccccgagtttaccgaagagcctgtccccaactccattggcaagtcccctgacagcgtcctcgtcacagccagcgtcaaggaagctgccgaggctttcctaggcttttcctatgcgcctcc

SEQ ID NO: 5013 - DNA, 445 bp, Homo sapiens
tgacaaaagccagcatactttccctgcacccatctgctcaccagatctcaggcaggaaagcccctctctgttgaagtcaggggctatcttttggtatacttgtgtgaaagtggctggttgggagcagagctaagtggcttcccattaacctgaggtctctttctttactctgggtcagacctgaggttggggaaggcgactgagccatgctcagaatgtctggtcctggcttgggcctgagtagggcagagagggcctttcatggctgatcagagcttaccagccccaccccaccatggtagccttagggtgctgagtgcctgatactgcctgacaagtgcctgacacgcagcctagttccttcctggcccctctctcactggctgggaaaccctagaccatgtcagataggacaacactgctgggttttacatccagatagtaa

SEQ ID NO: 5014 - DNA, 435 bp, Homo sapiens
  misc_feature (159)..(159): n includes a, c, g, or t, or contains no nucleotide
  misc_feature (164)..(165): n includes a, c, g, or t, or contains no nucleotide
  misc_feature (168)..(168): n includes a, c, g, or t, or contains no nucleotide
  misc_feature (188)..(228): n includes a, c, g, or t, or contains no nucleotide
  misc_feature (331)..(343): n includes a, c, g, or t, or contains no nucleotide
  misc_feature (345)..(351): n includes a, c, g, or t, or contains no nucleotide
ctctgcagccagacggaaaggcggctgcttgcctctccatcctccgaaaaacccctgaggacccccccccatcctcttctaggatgaggggaagctggagccccaactttgatcctccattggagtggcccaaatctttccatctagggcaagtcctgnaaagnnccnaaggccccctccccagtctnnnnnnnnnnnnnnnnnnnnnnnnnnnnnnnnnnnnnnnnnattgtcaaggccacccccaccccagaacagaaccgtgtctctgataaaggttttgaagtgaataaagttttaaaaactaaaaaaaaaaaaaaaaaaaaaaaannnnnnnnnnnnnannnnnnngggtcttggggggctggctgggcacaggcaggcatggtgacgggtgcctggaagggggagaggagtctgtgagtccctgcagat

SEQ ID NO: 5015 - DNA, 114 bp, Homo sapiens
gctcgctttcttgctgtccaatttctattaaaggttcctttgttccctaagtccaactactaaactgggggatattatgaagggccttgagcatctggattctgcctaataaaa

SEQ ID NO: 5016 - DNA, 272 bp, Homo sapiens
gagacaatggtctatcaccccaacattgacctcgagggcaacgtctgcctcaacatcctcagagaggactggaagccagtccttacgataaactccataatttatggcctgcagtatctcttcttggagcccaaccccgaggacccactgaacaaggaggccgcagaggtcctgcagaacaaccggcggctgtttgagcagaacgtgcagcgctccatgcggggtggctacatcggctccacctactttgagcgctgcctgaaatagggttg

SEQ ID NO: 5017 - DNA, 389 bp, Homo sapiens
  misc_feature (225)..(225): n includes a, c, g, or t, or contains no nucleotide
  misc_feature (228)..(228): n includes a, c, g, or t, or contains no nucleotide
  misc_feature (230)..(230): n includes a, c, g, or t, or contains no nucleotide
  misc_feature (234)..(234): n includes a, c, g, or t, or contains no nucleotide
  misc_feature (295)..(295): n includes a, c, g, or t, or contains no nucleotide
  misc_feature (337)..(338): n includes a, c, g, or t, or contains no nucleotide
  misc_feature (347)..(347): n includes a, c, g, or t, or contains no nucleotide
  misc_feature (356)..(358): n includes a, c, g, or t, or contains no nucleotide
  misc_feature (364)..(364): n includes a, c, g, or t, or contains no nucleotide
tcttccagttctactcgtaaaaggggaccctctgaagagactggaggggctgtgtttgatcatccagccaagattgccaagagtactaaatcctcttccctaaatttctccttcccttcacttcctacaatgggtcagatgcctgggcatagctcagacacaagtggcctttccttttcacagcccagctgtaaaactcgtgtccctcattcgaaactggataanagngnccantggggccaatggtcacaacacgacccagacaatagactatcaagacactgtgaatatgctncactccctgctcagtgcccagggtgttcagcccactcagccnnctgcatttngaatttgtnnntccttntagtgactatctgaatcctcggtct

SEQ ID NO: 5018 - DNA, 434 bp, Homo sapiens
  misc_feature (26)..(26): n includes a, c, g, or t, or contains no nucleotide
  misc_feature (30)..(30): n includes a, c, g, or t, or contains no nucleotide
  misc_feature (39)..(39): n includes a, c, g, or t, or contains no nucleotide
  misc_feature (48)..(48): n includes a, c, g, or t, or contains no nucleotide
  misc_feature (57)..(59): n includes a, c, g, or t, or contains no nucleotide
  misc_feature (70)..(70): n includes a, c, g, or t, or contains no nucleotide
  misc_feature (135)..(153): n includes a, c, g, or t, or contains no nucleotide
  misc_feature (225)..(264): n includes a, c, g, or t, or contains no nucleotide
  misc_feature (304)..(304): n includes a, c, g, or t, or contains no nucleotide
  misc_feature (343)..(357): n includes a, c, g, or t, or contains no nucleotide
ggccccagaggacctatacctagtgnaatncagggtccnagtccaatnaacatgggnnnggttgtccccnagggatccagacaggtcccagtcatgcagggaacaggaatgcaaggagcaagtatacagggtggnnnnnnnnnnnnnnnnnnnagtcccgggcagaaccaagtcactccacaggatcatgagaaggctgctttgattatgcaggttctacaactnnnnnnnnnnnnnnnnnnnnnnnnnnnnnnnnnnnnnnnncagagtatcctgattttaaaggaacaaatacagaaatccnctggagcaccttgataggttttcaaaaatacctggcaannnnnnnnnnnnnnntataattttgttgaaatattgaaaaaagatgacctgcatcctaacccttgaatgactcaaatcagtgccaggtggag

SEQ ID NO: 5019 - DNA, 464 bp, Homo sapiens
  misc_feature (89)..(89): n includes a, c, g, or t, or contains no nucleotide
ccccagatgggatggaaatgaaatggccaaaagagcaaaggcttatttcaaaacctttgtccctcagttccaggaggcagcatttgccnaatggaaagctctaggaaacaccagtcttgagaggtggccagccagactgcctgtccacatgcgtgtcagcacatacagccgcttcctggaagccgcctggaatgtcttcacggcagcgttttgctcacacagcagcttttgcacgccccaggcagccccgactgctgaaatccaacttgagctggctggtggtccctggatcctagagcccttcacttcgggttactccctctttcttgcctctatttcttagttggaagaaataaactcacaaattatggtgcagtaattttccggggaaagtaaagcctcaggaatgcccacgcctttcttccaaagcctttgtctctgagacctcttaagttctaagatta

SEQ ID NO: 5020 - DNA, 245 bp, Homo sapiens
  misc_feature (34)..(59): n includes a, c, g, or t, or contains no nucleotide
  misc_feature (177)..(177): n includes a, c, g, or t, or contains no nucleotide
  misc_feature (179)..(180): n includes a, c, g, or t, or contains no nucleotide
tcctttgtggccttaacccttctgcatcagggannnnnnnnnnnnnnnnnnnnnnnnnnacctcatgggaccagaccccttgggaccacatggcacaatgggacctctgttgtacattccggttgggggatgagcgttgctatttaattactaatattattgaatgccttagaggangnngggcgagcccggtgttctgaagacctgtggcccagcagagcctctgacagtaaagttttgctcca

SEQ ID NO: 5021 - DNA, 336 bp, Homo sapiens
tattaattgctttgagcacaactttaagaggacataatgggggcctggccatccacaagtggtggtaaccctggtggttgctgttttcctcccttctgctactggcaaaaggatctttgtggccaaggagctgctatagcctggggtggggtcatgccctcctctcccattgtccctctgccccatcctccagcagggaaaatgcagcagggatgccctggaggtggctgagcccctgtctagagagggaggcaagccctgttgacacaggtctttcctaaggctgcaaggtttaggctggtggcccaggaccatcatcctactgtaataaagatg

SEQ ID NO: 5022 - DNA, 475 bp, Homo sapiens
  misc_feature (26)..(26): n includes a, c, g, or t, or contains no nucleotide
  misc_feature (80)..(102): n includes a, c, g, or t, or contains no nucleotide
agcttagcgttcatccgtgtaacccngctcatcactggatgaagattctcctgtgctagatgtgcaaatgcaagctagtnnnnnnnnnnnnnnnnnnnnnnnctttctatagcagattgtgtaacaattttaatgctatttccccaggggaaaatgaaggttaggatttaacagtcatttaaaaaaaaaatttgttttgacggatgattggattattcatttaaaatgattagaaggcaagtttctagctagaaatatgattttatttgacaaaatttgttgaaattatgtatgtttacatatcacctcatggcctattatattaaaatatggctataaatatataaaaagaaaagataaagatgatctactcagaaatttttatttttctaaggttctcataggaaaagtacatttaatacagcagtgtcatcagaagataacttgagcaccgtcatggcttaatgtttattcc

SEQ ID NO: 5023 - DNA, 431 bp, Homo sapiens
  misc_feature (75)..(95): n includes a, c, g, or t, or contains no nucleotide
gacaagttttggtggcacgcagcctggggactctgcctcgtgccgctgagcctggcgcagatcgatttgaatatnnnnnnnnnnnnnnnnnnnnnattccacgtggagaaaaatggtcgctacagcatctctcggacggaggccgctgacctctgcaaggctttcaatagcaccttgcccacaatggcccagatggagaaagctctgagcatcggatttgagacctgcagtttgcattgcagtcaacagtcgaagaaggtgtgggcagaagaaaaagctagtgatcaacagtggcaatggagctgtggaggacagaaagccaagtggactcaacggagaggccagcaagtctcaggaaatggtgcatttggtgaacaaggagtcgtcagaaactccagaccagtttatgacagctgatgagacaaggaacc

SEQ ID NO: 5024 - DNA, 421 bp, Homo sapiens
  misc_feature (39)..(56): n includes a, c, g, or t, or contains no nucleotide
  misc_feature (320)..(334): n includes a, c, g, or t, or contains no nucleotide
gtgtttgcagcctgctctagtgggacagcccagagcctnnnnnnnnnnnnnnnnnnccccacccaatcaagggaagaaggaggaatgctggactggaggcccctggagccagatggcaagagggtgacagcttcctttcctgtgtgtactctgtccagttcctttagaaaaaatggatgcccagaggactcccaaccctggcttggggtcaagaaacagccagcaagagttaggggccttagggcactgggctgttgttccattgaagccgactctggccctggcccttacttgcttctctagctctctaggcctctccnnnnnnnnnnnnnnnccaccctccactcagctgtcctgcagcaaacactccaccctccaccttccattttcccccactactgcagcacctccaggcctgttg

SEQ ID NO: 5025 - DNA, 372 bp, Homo sapiens
ccccactgtcaatgggggattgtcccagcccctcttcccttcccctcacctggaagcttcttcaaccaatcccttcacactctctcccccatccccccaagatacacactggaccctctcttgctgaatgtgggcattaattttttgactgcagctctgcttctccagccccgccgtgggtggcaagctgtgttcatacctaaattttctggaaggggacagtgaaaagaggagtgacaggagggaaagggggagacaaaactcctactctcaacctcacaccaacacctcccattatcactctctctgcccccattccttcaagaggagaccctttggggacaaggccgtttctttgtttctgagcataaa

SEQ ID NO: 5026 - DNA, 530 bp, Homo sapiens
  misc_feature (28)..(28): n includes a, c, g, or t, or contains no nucleotide
  misc_feature (34)..(34): n includes a, c, g, or t, or contains no nucleotide
  misc_feature (40)..(40): n includes a, c, g, or t, or contains no nucleotide
  misc_feature (186)..(204): n includes a, c, g, or t, or contains no nucleotide
  misc_feature (208)..(209): n includes a, c, g, or t, or contains no nucleotide
  misc_feature (244)..(343): n includes a, c, g, or t, or contains no nucleotide
  misc_feature (480)..(480): n includes a, c, g, or t, or contains no nucleotide
  misc_feature (491)..(494): n includes a, c, g, or t, or contains no nucleotide
  misc_feature (496)..(497): n includes a, c, g, or t, or contains no nucleotide
  misc_feature (499)..(501): n includes a, c, g, or t, or contains no nucleotide
aacgccctggacctgaacatgaagaccnaagagnggatcntggaggaggccaacaaggcttttgagtataacatgcagatattcaatgaactggaccaggccggctccacactggccagagagaccttggaggatgggttccctgtacacgatgggaaaggagacatgcgtaaatgccctttctannnnnnnnnnnnnnnnnnnggtnncctggagggcagcagctgtcccttccgaacagctnnnnnnnnnnnnnnnnnnnnnnnnnnnnnnnnnnnnnnnnnnnnnnnnnnnnnnnnnnnnnnnnnnnnnnnnnnnnnnnnnnnnnnnnnnnnnnnnnnnnatgccacaccggtaccctcctcccgactgaccactggcctacccctttctccagccctgactaaactaccacctcaggtgactttttaaaaaatgctgggtttaagaaaggcaaccaataaaagccagatgctaganaaaaaaaaaannnnannannngcctctgcctgacagcatcctctctatgg

SEQ ID NO: 5027 - DNA, 366 bp, Homo sapiens
  misc_feature (109)..(109): n includes a, c, g, or t, or contains no nucleotide
cagttctgtagtgtcatttcttataaaaaacaaaacaacaacaataatttatcaaaattggcatatttaaagcctaacattctaataaaggcacaaatttctttttaanacttgtttcagcctctttaatctctttataagttaactaataaatctattttcttcagacttctgcaatagttctttaaaatcacaacagttagcaagctgacttttgtaatgtgctcaatacaaatacttgtgaacttttaatatgttgagtgctttcattttgataactggatctccatttgatattttcatttgtataactcatttgcagtctgaaaattttttttagtgccagtccctgaacatatcattgaa

SEQ ID NO: 5028 - DNA, 271 bp, Homo sapiens
  misc_feature (52)..(53): n includes a, c, g, or t, or contains no nucleotide
  misc_feature (137)..(158): n includes a, c, g, or t, or contains no nucleotide
  misc_feature (176)..(176): n includes a, c, g, or t, or contains no nucleotide
  misc_feature (178)..(178): n includes a, c, g, or t, or contains no nucleotide
  misc_feature (181)..(184): n includes a, c, g, or t, or contains no nucleotide
ccctgtgccccagatgatggattgattgtacagaaatcatgctgccatgctnnggggggggtcaccccgacccctcaggcccacctgtcacggggaacatggagccttggtgtatttttcttttctttttttaatgnnnnnnnnnnnnnnnnnnnnnncccagggctgcttcctgncntgnnnntgcggtgactgtgagcaggatcctggggccgaggctgcagctcagggcaacggcaggccaggtcgtgggtctccagccgtgcttggc

SEQ ID NO: 5029 - DNA, 345 bp, Homo sapiens
  misc_feature (225)..(239): n includes a, c, g, or t, or contains no nucleotide
acccgaagtagaggaacaggatgccagcaccctgcctgtgtcttgtgcctgggagagtgggatgaaacgccacagagcagcctgtgcttcggctagtattaatgtgtagatagcactctggtagctgttaactgcaagtttagcttgaattaagggatttggggggaccatgtaacttaattactgctagttttgaaatgtctttgtaagagtagggtcgccatnnnnnnnnnnnnnnnaagactaggatatgggtcacacttatctgtgttcctatggaaactatttgaatatttgttttatatggatttttattcactcttcagacacgctactcaagagtgc

SEQ ID NO: 5030 - DNA, 421 bp, Homo sapiens
  misc_feature (189)..(193): n includes a, c, g, or t, or contains no nucleotide
  misc_feature (211)..(211): n includes a, c, g, or t, or contains no nucleotide
  misc_feature (215)..(215): n includes a, c, g, or t, or contains no nucleotide
  misc_feature (217)..(219): n includes a, c, g, or t, or contains no nucleotide
tccaccaggcattagaggtccacctcccccaggaatgcgtccaccaagaccttagcatactgttgatccatctcagtcactttttcccctgcaatgcgtcttgtgaaattgtgtagagtgtttgtgagctttttgttccctcattctgcattaataatagctaataataaatgcatagagcaattaaannnnnaaaaaaaaaaaaaaaaanaaanannnataaaaagccatccaccctatagttcaacaacatatagccaactgctaaccaatgttatttctgtaaatcaatgacaattcctgaccaacagctcttgtaatcgcccttcttctgattcattcttttttctttaaacacttgagcctctattttgttctctggagcactccccaaggcaacttggaaatgtgtcctgtggct

SEQ ID NO: 5031 - DNA, 412 bp, Homo sapiens
  misc_feature (122)..(122): n includes a, c, g, or t, or contains no nucleotide
  misc_feature (131)..(131): n includes a, c, g, or t, or contains no nucleotide
  misc_feature (136)..(137): n includes a, c, g, or t, or contains no nucleotide
  misc_feature (161)..(161): n includes a, c, g, or t, or contains no nucleotide
  misc_feature (171)..(171): n includes a, c, g, or t, or contains no nucleotide
  misc_feature (199)..(199): n includes a, c, g, or t, or contains no nucleotide
  misc_feature (203)..(203): n includes a, c, g, or t, or contains no nucleotide
  misc_feature (233)..(233): n includes a, c, g, or t, or contains no nucleotide
  misc_feature (243)..(243): n includes a, c, g, or t, or contains no nucleotide
  misc_feature (252)..(252): n includes a, c, g, or t, or contains no nucleotide
  misc_feature (259)..(259): n includes a, c, g, or t, or contains no nucleotide
  misc_feature (269)..(269): n includes a, c, g, or t, or contains no nucleotide
  misc_feature (286)..(286): n includes a, c, g, or t, or contains no nucleotide
  misc_feature (303)..(303): n includes a, c, g, or t, or contains no nucleotide
attggccttgaggaagaagacatgctctacagtgctcagtctttgaggtcacgagaagagaatgccttctagatgcaaaatcacctccaaaccagaccacttttcttgacttgcctgttttnggccattangctgnnccttaaacgttaacagcacatttngaatgccttnattctacaatgcagcgtgttttcctttngccnttttttgcactttggtgaattacgtgcctnccataacctngaactgtgnccgactnccacaaaacngattatgtactcttctngagatagaagatgctgnttcttctgagagatacgttactctctccttggaatctgtggatttgaagatggctcctgccttctcacgtgggaatcagtgaagtgtttagaaactgctgcaagacaaa

SEQ ID NO: 5032 - DNA, 583 bp, Homo sapiens
tggttacagccacagggaggcatggagtgccatggaaggattcgccactacccagaccttgttttttgttgtattttggaagacaggttttttaaagaaacattttcctcagattaaaagatgatgctattacaactagcattgcctcaaaaactgggaccaaccaaagtgtgtcaaccctgtttccttaaaagaggctatgaatcccaaaggccacatccaagacaggcaataatgagcagagtttacagctcctttaataaaatgtgtcagtaattttaaggtttatagttccctcaacacaattgctaatgcagaatagtgtaaaatgcgcttcaagaatgttgatgatgatgatatagaattgtggctttagtagcacagaggatgccccaacaaactcatggcgttgaaaccacacagttctcattactgttatttattagctgtagcattctctgtctcctctctctcctcctttgaccttctcctcgaccagccatcatgacatttaccatgaatttacttcctcccaagagtttggactgcccgtcagattgtttctgcacatagttgcctttgt

SEQ ID NO: 5033 - DNA, 535 bp, Homo sapiens
tggcccagggcatctgggaggaaccgagggggctgctcccacctggctctgtggcgagccatttgtcccaagtgccaaagaagcagaccattggggctcccagccaggcccttgtcggccccaccagtgcctctccctgctgctcctaggacccgtctccagctgctgagatcctggactgagggggcctggatgccccctgtggatgctgctgcccctgcacagcaggctgccagtgcctgggtggatgggccaccgccttgcccagcctggatgccatccaagttgtatatttttttaatctctcgactgaatggactttgcacactttggcccagggtggccacacctctatcccggctttggtgcggggtacacaagaggggatgagttgtgtgaataccccaagactcccatgagggagatgccatgagccgcccaaggccttcccctggcactggcaaacagggcctctgcggagcacactggctcacccagtcctgcccgccaccgttatcggtgtcattcacctttc

SEQ ID NO: 5034 - DNA, 542 bp, Homo sapiens
  misc_feature (176)..(176): n includes a, c, g, or t, or contains no nucleotide
  misc_feature (187)..(187): n includes a, c, g, or t, or contains no nucleotide
  misc_feature (215)..(215): n includes a, c, g, or t, or contains no nucleotide
  misc_feature (256)..(256): n includes a, c, g, or t, or contains no nucleotide
cttataaactgttgttcctggaagttatttattccataaaaaatttgttcttttctcatgaatttataattcctaaatgaagaccagaaagtacaaattgctgggaggaagaataggctttattaatcaactgatgtcttgatttttctaaatgggaagattgctttatttttaancactaattatngggagcagattcttagcaaacttctttnggaaaagttaatgttatgatgtgcattaggctgccccatcngtgtatataaatgaagcagatttgatttttgtattcttacgtttctctgctttgtagttgtggctgtacttaaagaaatacagaatttcatatatttaaaaatgtttaaaatgtgacccacagaacattgtaaatgattaaaaactaacatgaaaatattacaacctaaaagaattcttaacttcacaagtgttttacttcgacgatgtgcctttgatttaatttgggacacttttttagaaggatacattattcgtgtttgcaacggtctttgaagagcttggaa

SEQ ID NO: 5035 - DNA, 290 bp, Homo sapiens
  misc_feature (39)..(54): n includes a, c, g, or t, or contains no nucleotide
  misc_feature (144)..(219): n includes a, c, g, or t, or contains no nucleotide
tgctcacaagagtgcgccctctactggagggcgaagaannnnnnnnnnnnnnnncctggtactgtggcactccgtgaaattagccattatcagacatctactgaactgattcgcaaacttcccttccagcatctggtgtgagannnnnnnnnnnnnnnnnnnnnnnnnnnnnnnnnnnnnnnnnnnnnnnnnnnnnnnnnnnnnnnnnnnnnnnnnnnnctatctggttggctttttgaagacaccaacctgtgtgctgtccgtcgacgcggccgcgaatttagtagtag

SEQ ID NO: 5036 - DNA, 508 bp, Homo sapiens
  misc_feature (130)..(170): n includes a, c, g, or t, or contains no nucleotide
  misc_feature (182)..(182): n includes a, c, g, or t, or contains no nucleotide
  misc_feature (213)..(213): n includes a, c, g, or t, or contains no nucleotide
  misc_feature (334)..(349): n includes a, c, g, or t, or contains no nucleotide
  misc_feature (438)..(438): n includes a, c, g, or t, or contains no nucleotide
  misc_feature (442)..(443): n includes a, c, g, or t, or contains no nucleotide
acaacagcagaagaggccatgtcccgaggtccacctcctgctcctgaggggggctcccgggatgaacaggatggagcttcagctgagacagaaccttgggcagctgcagtccccccagaatgggtccctnnnnnnnnnnnnnnnnnnnnnnnnnnnnnnnnnnnnnnnnncgcagccccctntgagtgatgcctacctcagtggtatgcctgnccaagagacgcaagacgatgcagggtgagggcccccagctgcttctctcagaggctgtgagccgggcagctaaggcagccggagctcggcccctgacgagccccgagagcctgagccgggnnnnnnnnnnnnnnnnggttcaggagagctacaggcagcagctccggtctgatatacaaaaacgactgcaggaagaccccaactacagtccccagcgcttccccnaatnnccagcgggcctttgctgatgatccttagctctttgctctatggcccttcctcatcaggggaccgt

SEQ ID NO: 5037 - DNA, 516 bp, Homo sapiens
  misc_feature (26)..(40): n includes a, c, g, or t, or contains no nucleotide
ccatacattgcgtgtgggagtatacnnnnnnnnnnnnnnnctggatgacagttgggtgatatgtgtcatgtggcctaaaagcctccatgtcatttgacctacgaattctatctttgggaatttatcctaagaaaatacttaaggatttagttagtgataagatgttcatcccagcattgcaatggagaaaaatgggaagcaatggtttggttgggaatttattccttttctgctgtaacgaaagtttgcaataggggattgcttaagtaaattattgtatctccatccagatggtggagtaccgcgcagacattaaaagtcatgtaaaagaacatctgactgaaagaaaaatgctccttgaatattaaaaggttgtaaaaatagtgcatgttatgtgatttcaattttgttttttaaaatatgggtgtatgcttgtatacgtagagcagataaaaaagacggaaggcatactaaaaaatgttgagtggttatctttgtatggtggaacaaagtcac

SEQ ID NO: 5038 - DNA, 240 bp, Homo sapiens
  misc_feature (26)..(56): n includes a, c, g, or t, or contains no nucleotide
atatgaatcggctacagtctcaaagnnnnnnnnnnnnnnnnnnnnnnnnnnnnnnngaaccgggccacccaaagtattgaacgttctcatcggattgccacagagactgaccagattggctcagaaatcatagaagagctgggggaacaacgagaccagttagaacgtaccaagagtagactggtaaacacaagtgaaaacttgagcaaaagtcggaagattctccgttcaatgtccaga

SEQ ID NO: 5039 - DNA, 331 bp, Homo sapiens
tgtgccctgggtcaccgtcaatgggaaacccttggaagatcagacccagctccttacccttgtctgccagttgtaccagggcaagaagccggatgtctgcccttcctcaaccagctccctcaggagtgtttgcttcaagtgatggccggtgagctgcggagagctcatggaaggcgagtgggaacccggctgcctgcctttttttctgatccagaccctcggcacctgctacttaccaactggaaaattttatgcatcccatgaagcccagatacacaaaattccaccccatgatcaagaatcctgctccactaagaatggtgctaaagta

SEQ ID NO: 5040 - DNA, 504 bp, Homo sapiens
  misc_feature (45)..(93): n includes a, c, g, or t, or contains no nucleotide
  misc_feature (158)..(158): n includes a, c, g, or t, or contains no nucleotide
  misc_feature (209)..(209): n includes a, c, g, or t, or contains no nucleotide
  misc_feature (324)..(446): n includes a, c, g, or t, or contains no nucleotide
aacacctcctgttgtggatggtgagcccctgatgccgcttatttnnnnnnnnnnnnnnnnnnnnnnnnnnnnnnnnnnnnnnnnnnnnnnnnnggagtttgttcagtggtacggtgtccaagcaaacagcagaatgcaactttctaaacagccccaangcaaacagcagaattcaactttttaaacaataaacaccatcaaccttattngactttattgtcccttaaattatattgactgttgtgattccatcaagtttgtacactcttttctctccctgttttgcagcaacaaattgcgaagtgcttttgtttgtttgttttnnnnnnnnnnnnnnnnnnnnnnnnnnnnnnnnnnnnnnnnnnnnnnnnnnnnnnnnnnnnnnnnnnnnnnnnnnnnnnnnnnnnnnnnnnnnnnnnnnnnnnnnnnnnnnnnnnnnnnnnnnnccttttattatatagttgtttacatacttataagtctatcatttaaagacatgtactg

SEQ ID NO: 5041 - DNA, 464 bp, Homo sapiens
  misc_feature (206)..(206): n includes a, c, g, or t, or contains no nucleotide
  misc_feature (236)..(236): n includes a, c, g, or t, or contains no nucleotide
  misc_feature (247)..(247): n includes a, c, g, or t, or contains no nucleotide
  misc_feature (359)..(359): n includes a, c, g, or t, or contains no nucleotide
  misc_feature (370)..(372): n includes a, c, g, or t, or contains no nucleotide
  misc_feature (414)..(414): n includes a, c, g, or t, or contains no nucleotide
  misc_feature (432)..(434): n includes a, c, g, or t, or contains no nucleotide
cgacctctcagatattagggaggttcccctgaaggatgctaaggaatacgctgaatccataggtgccatcgtggttgagacaagtgcaaaaaatgctattaatatcgaagagctctttcaaggaatcagccgccagatcccacccttggacccccatgaaaatggaaacaatggaacaatcaaagttgagaagccaaccatgcaanccagccgccggtgctgttgacccaagggcngtggtccacgntacttgaagaagccagagcccacatcctgtgcactgctgaaggaccctacgctcggtggcctggcacctcactttgagaagagtgagcacactggctttgcatcctggaagncctgcaggggnnngggcaggaaatgtacctgaaaaggattttagaaaaccctggnaaacccaccacaccaccnnnacaaaatggcctttagtgtatgaaatgcac

SEQ ID NO: 5042 - DNA, 384 bp, Homo sapiens
cttcccttacaatgtgcctttggggctgcccggccttgcgtcagccgcctgccccctcttcctatgcagctttaatgtccccgtgtccccggggtgggagttcaaggctcagtaatggcctggtcccccggcccctgccccatctcctcatcatccccagccttgatggaggagggagggcttcaggacggggcgtcagagggagccccctctgggagggaaccaacccccaccctccctcctgggaccccccagcagtagacggcttgggggagtcggaggctccccggcagacaccccacccccatcttgttcccttgaggtgcctcctctcctctgcccaggggagggagtgtggacagtatctggaagttctgggattca

SEQ ID NO: 5043 - DNA, 434 bp, Homo sapiens
  misc_feature (26)..(113): n includes a, c, g, or t, or contains no nucleotide
  misc_feature (236)..(260): n includes a, c, g, or t, or contains no nucleotide
tttccgtctttttgatgagaacaatnnnnnnnnnnnnnnnnnnnnnnnnnnnnnnnnnnnnnnnnnnnnnnnnnnnnnnnnnnnnnnnnnnnnnnnnnnnnnnnnnnnnnnnnaagacctacctggagtggcccatggacgaggctcagcgggaaggattttgggtaaatctgagagctgcgataaagtcctaggttcccatatttaagaccagtctttgtctagttgggatcttnnnnnnnnnnnnnnnnnnnnnnnnnattcagacataattatataaaaactacgtggatgtaccgtcatttgaggacttgcttactaaaactacaaaacttcaaattttgtctggggtgctgttttataaacatatgccagatttaaaaattggtttttggtttttcttttttctatgagataaccatgatcataagtct

SEQ ID NO: 5044 - DNA, 507 bp, Homo sapiens
  misc_feature (55)..(57): n includes a, c, g, or t, or contains no nucleotide
  misc_feature (78)..(78): n includes a, c, g, or t, or contains no nucleotide
  misc_feature (80)..(81): n includes a, c, g, or t, or contains no nucleotide
  misc_feature (83)..(84): n includes a, c, g, or t, or contains no nucleotide
  misc_feature (88)..(94): n includes a, c, g, or t, or contains no nucleotide
  misc_feature (97)..(98): n includes a, c, g, or t, or contains no nucleotide
  misc_feature (101)..(102): n includes a, c, g, or t, or contains no nucleotide
  misc_feature (105)..(109): n includes a, c, g, or t, or contains no nucleotide
  misc_feature (113)..(114): n includes a, c, g, or t, or contains no nucleotide
  misc_feature (116)..(169): n includes a, c, g, or t, or contains no nucleotide
  misc_feature (252)..(268): n includes a, c, g, or t, or contains no nucleotide
  misc_feature (387)..(403): n includes a, c, g, or t, or contains no nucleotide
taagcggtcatcgttgcgtcatggggcaggcgtggggagcttcctgtcgccttgnnngggtgtggggcctgggaggangnncnngggnnnnnnnccnnccnnggnnnnngggnngnnnnnnnnnnnnnnnnnnnnnnnnnnnnnnnnnnnnnnnnnnnnnnnnnnnnnntctgcaccttcgggtgggagcggggactgatctactttcacattctcaagtttttctcatctgcattagaggtgcccagtagnnnnnnnnnnnnnnnnncgtgcccctccctcagacacacggacacaatcagccgagaagttcctggtctgaatcacgagaatgtggaggggtggggggtgtcagtggaaaggcataaggctgagctgagaccagtnnnnnnnnnnnnnnnnncaatctggggaggggaacatccttgccagggagtttctgagggtctgctttgtttacctttcgtgcggtggattctttttaactccgtctacctggcgttttgt

SEQ ID NO: 5045 - DNA, 540 bp, Homo sapiens
  misc_feature (301)..(302): n includes a, c, g, or t, or contains no nucleotide
  misc_feature (304)..(330): n includes a, c, g, or t, or contains no nucleotide
agcaatgacagaaccagctgcaccatgtaccccaccttcagtttaaaagaaaaaaaaaatccccttcactcctactgggaggtgggacccctttcattttcagttttgctcatctagggaaaataaggctttggtttccagtttaattgtttttgaccttctaaaatgtttttatgttagcactgatagttggcattactgttgttaagcactgtgttccagaccgtgtctgacttagtgtaacctaggagattttatagttttattttaatgaaaccctgattgacgcacagcagtgggnngnnnnnnnnnnnnnnnnnnnnnnnnnnnagccaggaagccccgtttgtaagcgtgtgttgtggtgctttattgtacatcctccagtggcgttctttttactctaatgttcttttggtttcccccctcagaagaatcatgaatttgcaacagacctaatttttggttactttttgtcttattgatggatttgaaaatgaaagatttaataaggcaaagcagaatctgttgtccttaatt

SEQ ID NO: 5046 - DNA, 445 bp, Homo sapiens
  misc_feature (35)..(51): n includes a, c, g, or t, or contains no nucleotide
  misc_feature (174)..(174): n includes a, c, g, or t, or contains no nucleotide
gggtgatacttttgccctccttgtgcccctctcannnnnnnnnnnnnnnnnaggaagaaagaatggcactcttgggcttggcccagaattagagttattagagcaagagagagcttaggaagcatgagggcaactatagtgaggccttattgccaggagggagggttttggttnctggcgcttgtgtataaaggggcaagagcagctcctttggactattcctgggaggactctgatgcagggcgtctgttgctcccctgggtcacctcctccctgctcgctgacatctggggctttgaccctttcttttttaatctacttttgctaagatgcatttaataaaaaaaaagagagagagagagaggtgtgagggacaaaatgcaaacctatttcccttgcctcataggcttctgggatgtcatcacctccagtttgttggttttgt

SEQ ID NO: 5047 - DNA, 557 bp, Homo sapiens
  misc_feature (98)..(98): n includes a, c, g, or t, or contains no nucleotide
  misc_feature (100)..(100): n includes a, c, g, or t, or contains no nucleotide
  misc_feature (102)..(102): n includes a, c, g, or t, or contains no nucleotide
  misc_feature (144)..(144): n includes a, c, g, or t, or contains no nucleotide
  misc_feature (152)..(152): n includes a, c, g, or t, or contains no nucleotide
  misc_feature (157)..(157): n includes a, c, g, or t, or contains no nucleotide
  misc_feature (163)..(163): n includes a, c, g, or t, or contains no nucleotide
  misc_feature (173)..(173): n includes a, c, g, or t, or contains no nucleotide
  misc_feature (176)..(178): n includes a, c, g, or t, or contains no nucleotide
  misc_feature (180)..(180): n includes a, c, g, or t, or contains no nucleotide
  misc_feature (183)..(183): n includes a, c, g, or t, or contains no nucleotide
  misc_feature (186)..(216): n includes a, c, g, or t, or contains no nucleotide
  misc_feature (218)..(228): n includes a, c, g, or t, or contains no nucleotide
  misc_feature (248)..(248): n includes a, c, g, or t, or contains no nucleotide
  misc_feature (250)..(250): n includes a, c, g, or t, or contains no nucleotide
  misc_feature (261)..(262): n includes a, c, g, or t, or contains no nucleotide
  misc_feature (265)..(268): n includes a, c, g, or t, or contains no nucleotide
  misc_feature (270)..(272): n includes a, c, g, or t, or contains no nucleotide
  misc_feature (274)..(283): n includes a, c, g, or t, or contains no nucleotide
  misc_feature (286)..(287): n includes a, c, g, or t, or contains no nucleotide
  misc_feature (289)..(289): n includes a, c, g, or t, or contains no nucleotide
  misc_feature (292)..(292): n includes a, c, g, or t, or contains no nucleotide
  misc_feature (294)..(295): n includes a, c, g, or t, or contains no nucleotide
  misc_feature (306)..(306): n includes a, c, g, or t, or contains no nucleotide
  misc_feature (310)..(310): n includes a, c, g, or t, or contains no nucleotide
  misc_feature (314)..(314): n includes a, c, g, or t, or contains no nucleotide
  misc_feature (321)..(321): n includes a, c, g, or t, or contains no nucleotide
  misc_feature (332)..(332): n includes a, c, g, or t, or contains no nucleotide
  misc_feature (334)..(334): n includes a, c, g, or t, or contains no nucleotide
  misc_feature (337)..(337): n includes a, c, g, or t, or contains no nucleotide
  misc_feature (346)..(346): n includes a, c, g, or t, or contains no nucleotide
  misc_feature (368)..(368): n includes a, c, g, or t, or contains no nucleotide
agtttcagctatcaggacaaaagctctttatccctcagattactccaaagcataatgggctctatgcttgctctgctcgtaactcagccactggcgangnanagctccacatccttgacaatcagagtcattgctcctccaggnttaggaanttttnctttcnataatccaangtnnnanccntgnnnnnnnnnnnnnnnnnnnnnnnnnnnnnnngnnnnnnnnnnnaaaagactatgaaaaggacncntgaatacaagnnccnnnnannntnnnnnnnnnnccnncnggncnnaagaactttcnaaantttnatgaacnggctgataccntncangaaattcangacaaagaagaaaagaactccnatttcattggactaaataacaaaaggataatgttttcataattttttattggaaaatgtgctgattttttgaatgttttatcctccagatttatgaatttttttcttcagcaattggtaaagtatacttttgtaaacaaaaattgaaacatttgcttttgctctctgagtgccccagaattgggaatct

SEQ ID NO: 5048 - DNA, 497 bp, Homo sapiens
  misc_feature (34)..(34): n includes a, c, g, or t, or contains no nucleotide
  misc_feature (51)..(51): n includes a, c, g, or t, or contains no nucleotide
  misc_feature (60)..(60): n includes a, c, g, or t, or contains no nucleotide
  misc_feature (219)..(219): n includes a, c, g, or t, or contains no nucleotide
  misc_feature (396)..(396): n includes a, c, g, or t, or contains no nucleotide
ggtcagtatctcagcgtgtgaattatagaggaantacagagagaacctctnccacttttnacttttcgtccaaataaaatgcatggtgtaccagaagttgaagatcgggttgaggattggggctagctcgatgacactaaggccccaacatcgcgggacctgctgtggcgcggattcttaggaacgctgttctagccggccccctctccaggggtcgcngtggccggcattatttcctagttcttcttgtaaccctgaggtgccagcgcggggagtgaggaggggtcagggggctaaggatgcaacctctgacgttctgcgccttcctaggagagtcttacatgtgttgagatttcacaagcaatgcgagttgtaaaataccagctctacaagaanctaggctctgtgacggcatagttttcagtagctttatcacaatattcacaatggagaattatatgacatggtagcagaaataggcccttttatgtgttgct

SEQ ID NO: 5049 - DNA, 53 bp, Homo sapiens
tattaaagtgagtgaccctgcgacccactctttggaccagcagcggatgaata

SEQ ID NO: 5050 - DNA, 283 bp, Homo sapiens
tgctgctgtttcttcaagaggagaaagagaaaatcgctgcagcgacacaagtgaccctgggcgcgtgcagccccctgaatcttctccgtgcagccccttggggcgcgaccttgtgcgaggccctcggggcccacccacagcggcccagggccagaccctggctggaagccagaacgcagactgcaggggccgcgcctggctcaggcggccccacccccgggacgtggggtcacttccttcatgtaagactttggccgaaatttctacacctgtgtctagtcct

SEQ ID NO: 5051 - DNA, 263 bp, Homo sapiens
  misc_feature (34)..(34): n includes a, c, g, or t, or contains no nucleotide
  misc_feature (47)..(47): n includes a, c, g, or t, or contains no nucleotide
  misc_feature (78)..(78): n includes a, c, g, or t, or contains no nucleotide
  misc_feature (83)..(83): n includes a, c, g, or t, or contains no nucleotide
  misc_feature (92)..(92): n includes a, c, g, or t, or contains no nucleotide
  misc_feature (128)..(128): n includes a, c, g, or t, or contains no nucleotide
  misc_feature (160)..(160): n includes a, c, g, or t, or contains no nucleotide
gggctttgatgttccttccagtgtcatttctcantccacataccctnacctggccccctcagtgttgtcaccagatcngattngtaacccantgagaggacagagagaaataagtgccctctcccacnctcttcctactggtctctctatgcctctctanagtctcgtctcttttaccctggcccctctcccttgggctctgatgaaaaattgctgactgtagctttggaagtttagctctgagaaccgtagatgatttcagt

SEQ ID NO: 5052 - DNA, 534 bp, Homo sapiens
  misc_feature (276)..(277): n includes a, c, g, or t, or contains no nucleotide
  misc_feature (290)..(290): n includes a, c, g, or t, or contains no nucleotide
  misc_feature (293)..(297): n includes a, c, g, or t, or contains no nucleotide
  misc_feature (368)..(406): n includes a, c, g, or t, or contains no nucleotide
  misc_feature (441)..(442): n includes a, c, g, or t, or contains no nucleotide
acagaactacaggtgcacccaaccacggacatgcattaactcgtcatgagaaatctaggtaggctaagtaggatgagagaatgtttgtcactcccaaaaatatctggagaggaagaatggaggattggcattgagatccatgtggacaagctaagtgggctctgtctgaaagctggcattcatccacaacattaaaaaaatatcaaaataagaaaggctgtaaattaaaaagaaaacacagaaaatactgctctcataaagatctgattgccttgnnacaggccctgtgngannnnntcaaacgcatcactcccaactcccattgcagaagaaaagctattcaactctcagcggtggaggagtgcatnnnnnnnnnnnnnnnnnnnnnnnnnnnnnnnnnnnnnnncagacgcggatcttggaaatccaggacttcttggnnaagttgactgaaggtatattagatatttccccacaaaaatactatttggattctcccaccccctccctcccttgatgggacaacatcctgta

SEQ ID NO: 5053 - DNA, 499 bp, Homo sapiens
  misc_feature (51)..(70): n includes a, c, g, or t, or contains no nucleotide
  misc_feature (73)..(73): n includes a, c, g, or t, or contains no nucleotide
  misc_feature (82)..(83): n includes a, c, g, or t, or contains no nucleotide
  misc_feature (90)..(90): n includes a, c, g, or t, or contains no nucleotide
  misc_feature (93)..(93): n includes a, c, g, or t, or contains no nucleotide
  misc_feature (125)..(125): n includes a, c, g, or t, or contains no nucleotide
  misc_feature (140)..(140): n includes a, c, g, or t, or contains no nucleotide
  misc_feature (144)..(144): n includes a, c, g, or t, or contains no nucleotide
  misc_feature (338)..(359): n includes a, c, g, or t, or contains no nucleotide
taaaccatgcagtactggctgttgggtatggagaaaaaaatgggatccctnnnnnnnnnnnnnnnnnnnnctnggggtcccnnagtgggnaantgaacgggtacttcctcatcgagcgcggaaangaacatgtgtggccntggnctgcctgcgcctcctaccccatccctctggtgtgagccgtggcagccgcagcgcagactggcggagaaggagaggaacgggcagcctgggcctgggtggaaatcctgccctggaggaagttgtggggagatccactgggacccccaacattctgccctcacctctgtgcccagcctggaaacctacagacaagnnnnnnnnnnnnnnnnnnnnnncccgtgtctatgacgcaaagatcaccagccatgtgccttagtgtccttcttaacagactcaaaccacatggaccacgaatattctttctgtccagaagggctactttccacatatagagctccagggactgtcttttctg

SEQ ID NO: 5054 - DNA, 538 bp, Homo sapiens
  misc_feature (27)..(27): n includes a, c, g, or t, or contains no nucleotide
  misc_feature (206)..(206): n includes a, c, g, or t, or contains no nucleotide
  misc_feature (222)..(237): n includes a, c, g, or t, or contains no nucleotide
  misc_feature (383)..(383): n includes a, c, g, or t, or contains no nucleotide
  misc_feature (446)..(446): n includes a, c, g, or t, or contains no nucleotide
  misc_feature (479)..(479): n includes a, c, g, or t, or contains no nucleotide
ggtacatcacctaccggctggtgcagntagctaccgcctgacagcccctagaggcggacacacagcgacccccatccctgcaggacaaacgcccctgccctgccagaatccggcccccacagctctcacggctgctgctcctctggactccccaaggcaggtggcctccacccacgttctcccgtcctggggtgaggcttcctgtngcccagcccgccccannnnnnnnnnnnnnnntgcgagatgcagcctcagaaggaacaaggcccccagagggaggtcacctgggggcagctggtgccgggtcttcacccagaccacgctgggtcccctctgttgggggtttggggtccgggtctcccaccagccactgcttcctcctnggccctcggccttccacccctcgtcttccctccctcgggggccctgatgcgtggcggcccccncccggcctcggctctttactccattcacagccntgcacgcgctcaagccaccagggtgcgagatgccagctctggagttctcggttgttgta

SEQ ID NO: 5055 - DNA, 436 bp, Homo sapiens
  misc_feature (41)..(55): n includes a, c, g, or t, or contains no nucleotide
  misc_feature (323)..(323): n includes a, c, g, or t, or contains no nucleotide
ctcaggtgctttgagaaaagtctaggggctggtgtgcttgnnnnnnnnnnnnnnngctaagagatgaggatctgggcttcctggtcaggggaacgtcatgaggagcctgtgccagtgctgtgtgcttggcgtgtgcgtgtcggcagctctgtggtggttcttcagggcaccctgatgggagtccctcgccttctctccacagcgccttgggtgtctcctcctggagcgaggcattgaacctcaggtgatgtcagccctggttcgtctcggcctcagaggagcccggctatttttcctgaacagccccccttcctccctggganactttcggggtggccagcgtgcttgcttcccaggcaggctgaggtctacctccccgcaggcgtctggcctcaggcctgcagtggatgattgtgggctgtgtggcctttgcctt

SEQ ID NO: 5056 - DNA, 579 bp, Homo sapiens
  misc_feature (43)..(43): n includes a, c, g, or t, or contains no nucleotide
  misc_feature (63)..(64): n includes a, c, g, or t, or contains no nucleotide
  misc_feature (195)..(210): n includes a, c, g, or t, or contains no nucleotide
  misc_feature (277)..(344): n includes a, c, g, or t, or contains no nucleotide
  misc_feature (347)..(347): n includes a, c, g, or t, or contains no nucleotide
  misc_feature (448)..(448): n includes a, c, g, or t, or contains no nucleotide
cgatctgcacctggtgcgtgggccaggccgccagcatgggctnccctgcttctcgccgccggnnccccaggcatgcgccactcgctccccaactcccgtatcatgatccaccagccctcaggaggcgcccggggccaagccacagacattgccatccaggcagaggagatcatgaagctcaagaagcagctctannnnnnnnnnnnnnnncacaccaaacagagcctgcaggtgatcgagtccgccatggagagggaccgctacatgagccccatgnnnnnnnnnnnnnnnnnnnnnnnnnnnnnnnnnnnnnnnnnnnnnnnnnnnnnnnnnnnnnnnnnnnnccnacgctggtgcagaaggagcctgtagaagcagcgccggcagcagaacctgtcccagctagcacctgagagctgggcctcctctccagaatcatgtggagggnccagaggcctgccagacccccagctgggccctgctcaccccttgttgctgggcttggaggggcctcttgaggaacttttaatttgcaggggtgcccgctatggacggggcattccagctgagacactgtga

SEQ ID NO: 5057 - DNA, 161 bp, Homo sapiens
  misc_feature (27)..(27): n includes a, c, g, or t, or contains no nucleotide
  misc_feature (58)..(58): n includes a, c, g, or t, or contains no nucleotide
  misc_feature (61)..(61): n includes a, c, g, or t, or contains no nucleotide
  misc_feature (63)..(105): n includes a, c, g, or t, or contains no nucleotide
tgttcagagcatcagatgaagacttcnattgggttttatagtggctttctgatttttnggntnnnnnnnnnnnnnnnnnnnnnnnnnnnnnnnnnnnnnnnnnnngtatactgttaacgattgtctgcccatgtcctgcctgaaataccatgattgtttat

SEQ ID NO: 5058 - DNA, 311 bp, Homo sapiens
ctgctccaccttgtgacccagggtggggacaggggctggcccagggctgcaatgcagcatgttgccctggcacctgtggccagtactcgggacagactaagggcgcttgtcccatcctggacttttcctctcatgtctttgctgcagaactgaagagactaggcgctggggctcagcttccctcttaagctaagactgatgtcagaggccccatggcgaggccccttggggccactgcctgaggctcacggtacagaggcctgccctgcctggccgggcaggaggttctcactgttgtgaaggttgtagac

SEQ ID NO: 5059 - DNA, 64 bp, Homo sapiens
tgggcagacttcctgtctttgaggctaatggacccgtggggcttgtaatctgtctctttctact

SEQ ID NO: 5060 - DNA, 562 bp, Homo sapiens
  misc_feature (128)..(154): n includes a, c, g, or t, or contains no nucleotide
  misc_feature (325)..(341): n includes a, c, g, or t, or contains no nucleotide
ctatgggacagctttacgagaaggaaaaagatgaagatggattcttatatgtggcctacagcggagagaacacttttggcttctgagggccattgctgggctaggtgcaccgtaactgcttgtgtatnnnnnnnnnnnnnnnnnnnnnnnnnnnattataccagaacctcttcacatagacctattagtgcatttgtaactggatttatttcttaatatattggaaggttttgtttccttagactagtaaattatcatacagagttttattttgagtttttctttttgtgcattgtcctcatgcctgtattctccaggaaacttnnnnnnnnnnnnnnnnnattgaatgatatttctatatcgaagtgaggtaggtgcggtattaaagtgaaagggaaggtgatgcatttattctgggttatgcttgaagtgttagatggctaagtattaaaattatccaaattaaatccttagcagtcagaacacttgcttcactagaatatgccaactgccaatcatgttggactgagctaatttgttcctctttctgaaactattaagg

SEQ ID NO: 5061 - DNA, 460 bp, Homo sapiens
ccagggagagcttccgcttggtgaccagggacatgtcccagatggacatagaagcccctctctgcctccctgggattttttagacttttacttttgatttccctaggatggaagagtataggtgggagataagggaagtggggtgagaggagaaaggaaatgttggcatgggcctgtgtgatgtccctgaggcagaagagccggggactgatgggttcaggtgggagctgctgggtgaggcagggaacccttttcactcccattccttagctttagtctaatggagccaaggactgctgggaccttcaaccctgatcttttgtcttccagtcttctcttagtgtcctgctcctaggtttccctctcttctggttcttctcccaggtattctcttcccaggcctctctggccactgctttgtatcagggtttttcacgcttttgtagaactgaggtttcaa

SEQ ID NO: 5062 - DNA, 605 bp, Homo sapiens
  misc_feature (39)..(39): n includes a, c, g, or t, or contains no nucleotide
  misc_feature (80)..(80): n includes a, c, g, or t, or contains no nucleotide
  misc_feature (101)..(101): n includes a, c, g, or t, or contains no nucleotide
  misc_feature (130)..(130): n includes a, c, g, or t, or contains no nucleotide
  misc_feature (289)..(304): n includes a, c, g, or t, or contains no nucleotide
  misc_feature (453)..(453): n includes a, c, g, or t, or contains no nucleotide
  misc_feature (456)..(456): n includes a, c, g, or t, or contains no nucleotide
  misc_feature (458)..(459): n includes a, c, g, or t, or contains no nucleotide
  misc_feature (462)..(467): n includes a, c, g, or t, or contains no nucleotide
  misc_feature (541)..(541): n includes a, c, g, or t, or contains no nucleotide
  misc_feature (560)..(560): n includes a, c, g, or t, or contains no nucleotide
  misc_feature (566)..(568): n includes a, c, g, or t, or contains no nucleotide
  misc_feature (571)..(573): n includes a, c, g, or t, or contains no nucleotide
  misc_feature (575)..(575): n includes a, c, g, or t, or contains no nucleotide
  misc_feature (578)..(578): n includes a, c, g, or t, or contains no nucleotide
tgtccactcattttatgtagatttggtatcctcagcagnccagtgttaacaccactgtcacgtagtgtacagattcatcnttttatgtatttaaagtaatnccatactatgatttggtttttccctgcanccattaattctggcatcagatcagtttttgtgttgtgaagttctactgtggtttgacccaagaccacaaccatgagaccctgaagtaaagataaggtacacatacattatttgagtaactgtttccttgggggccaatctgtgtatgcttttagaagtnnnnnnnnnnnnnnnntttttgtctataacaaacagtctgtcatttatttctgttgataaaccatttggacagagtgaggacgtttgccctgttatctcctagtgctaacaatacactccagtcatgagccgggctttacaaataaagcacttttgatgactcanaanannaannnnnntttcctctgtcccaattgtgtgtctctgttccaaacacattttaaatactcggtcctgacagtgtctttagctnatccttgaagaaataaaantggaannnaannntnaanaccgagtatttagctaatccttgaaga

SEQ ID NO: 5063 - DNA, 198 bp, Homo sapiens
  misc_feature (41)..(41): n includes a, c, g, or t, or contains no nucleotide
ataggatcagctccttgacctctgaggggcaggagtgcttncctggtgtgtgtattagaatcccttcctgccttgtttcatggcagtgaaatgcctcttggtcctgtccaagtgtatctttcactgatttctgaatcatgttctagttgcttgaccctgccacatgggtccagtgttcatctgagcataactgtacta

SEQ ID NO: 5064 - DNA, 541 bp, Homo sapiens
ctatgccagagtttccagaccttcagcatctgctatgcagagacgggcttgctgggtgcacactttgtctgtgaccgaatgaaaatcgatgacatgatgttcgtcctgcaagggcagtggatgcgcctgtgtaccagtgccacggagagtgaggtggcccggggcaaaaacatcctcagaaatgccctggtatctcatctagatggcactactcctgtgtgtgaggacatcggacgcagcctcctgacctatggccgccgcatccccctggctgaatgggaaagccggattgcggaggtggatgccagtgtggtacgtgagatctgctccaagtacatctatgaccagtgcccagcagtggctggatatggccccattgagcagctcccagactacaaccggatccgtagcggcatgttctggctgcgcttctaggcgggaagcctatgtaagcaagagggcagggccggggtttgtggtcccccccccaccacaaacacagcacttcggctcctctaacctgtgccacaggtgaccacca

SEQ ID NO: 5065 - DNA, 391 bp, Homo sapiens
cagcctctgaatgaaatgctactttctttagaaatataatagctgccttagacattatgaggtatacaactagtatttaagataccatttaatatgccccgtaaatgtcttcagtgttcttcagggtagttgggatctcaaaagatttggttcagatccaaacaaatacacattctgtgttttagctcagtgttttctaaaaaaagaaactgccacacagcaaaaaattgtttactttgttggacaaaccaaatcagttctcaaaaaatgaccggtgcttataaaaagttataaatatcgagtagctctaaaacaaaccacctgaccaagagggaagtgagcttgtgcttagtatttacattggatgccagttttgtaatcactgacttat

SEQ ID NO: 5066 - DNA, 205 bp, Homo sapiens
  misc_feature (110)..(110): n includes a, c, g, or t, or contains no nucleotide
tcccggggcccccactgtggagataagaaggggatggaatgggggaagaggaggagcaggaggccctcatccttctgctgccctggggttggggcctcacccctctgganggccggaggcaggaggtggaaaccccaggggctggcttttttaaaactggttttattttaatttttattatattttcagtttttccataaaggag

SEQ ID NO: 5067 - DNA, 420 bp, Homo sapiens
  misc_feature (51)..(51): n includes a, c, g, or t, or contains no nucleotide
  misc_feature (135)..(152): n includes a, c, g, or t, or contains no nucleotide
tggcaccatacaggaagattacttgagagagctgctgacaaccatgggggnatcggtttacagatgaggaagtggatgagctgtacagagaagcacctattgataaaaaggggaatttcaattacatcgagttcnnnnnnnnnnnnnnnnnnggagccaaagacaaagatgactgaaataacttcaaattccagccaaacgttccttgttgccactttgggtattctgagattttctcttgcatgcccttagctttacagcttttgcatttcctgttgtatttattctcagccattttgggcatatgtatctttataatcagactggaaacgggactttctattaatatcattttcagaataaaaaataggataatttaacctaccagcccttctcccccaataactgtggtctatacag

SEQ ID NO: 5068 - DNA, 368 bp, Homo sapiens
  misc_feature (65)..(65): n includes a, c, g, or t, or contains no nucleotide
  misc_feature (76)..(76): n includes a, c, g, or t, or contains no nucleotide
  misc_feature (87)..(87): n includes a, c, g, or t, or contains no nucleotide
  misc_feature (95)..(95): n includes a, c, g, or t, or contains no nucleotide
  misc_feature (105)..(105): n includes a, c, g, or t, or contains no nucleotide
  misc_feature (111)..(111): n includes a, c, g, or t, or contains no nucleotide
  misc_feature (139)..(139): n includes a, c, g, or t, or contains no nucleotide
  misc_feature (152)..(152): n includes a, c, g, or t, or contains no nucleotide
  misc_feature (169)..(169): n includes a, c, g, or t, or contains no nucleotide
gtctccttaaagttacgtccatgctttaaaatgtctgtgtaggagagaagtggggtttataatgnttttctctaangatatctttgnctgctttnccagactttngaaacntattaagcttcttaactgcctcttaccnggaaatacttctnggggaaacttcatggtncccaaaatgtcattgccatacagcttcactagagttctttgaaccacagctgaaaagagctttgtattattttttaattccctccccagatatcatttaggagtattatataaaggtggtgggcaaaaacaatgtaaggagcctttccagttatcttgagttgcagctctgtagtttcttgaggccaaacacactgtat

SEQ ID NO: 5069 - DNA, 250 bp, Homo sapiens
gtattgtttcagtcacagaaagcttttctgggtacctctggttagcactttctactctctgatatttcctatgtacatagcttttattgttgtaaatcctttcttaatggttaaataggattgttagcaactatgggtttgcagttttctgagtaggtgagttttgaatatgggtaaatcagaataatgagacaacttgttaatctctttaatactaaaaataaattactcttctatttcagggacttag

SEQ ID NO: 5070 - DNA, 524 bp, Homo sapiens
ctgggcccgagcctgaactgagccccagcgggctggcgggcctttttcctgcgtcccagcctgcacccctccggccccgtctctcttggacccacctgtggggcctggggagcccactgaggggccagggaggaaggaggccacggagcgggaggcagcgccccaccacgtcgggcttccctggcctcccgccactcgccttcttagagttttattcctttccttttttgagattttttttccgtgtgtttattttttattatttttcaagataaggagaaagaaagtacccagcaaatgggcattttacaagaagtacgaatcttatttttcctgtcctgcccgtgagggtgggggggaccgggcccctctctagggacccctcgccccagcctcattccccattctgtgtcccatgtcccgtgtctcctcggtcgccccgtgtttgcgcttgaccatgttgcactgtttgcatgcgcccgaggcagacgtctgtcaggggcttggatttcgtgtgccgctgc

SEQ ID NO: 5071 - DNA, 598 bp, Homo sapiens
  misc_feature (112)..(112): n includes a, c, g, or t, or contains no nucleotide
  misc_feature (115)..(116): n includes a, c, g, or t, or contains no nucleotide
  misc_feature (118)..(118): n includes a, c, g, or t, or contains no nucleotide
  misc_feature (120)..(126): n includes a, c, g, or t, or contains no nucleotide
  misc_feature (128)..(407): n includes a, c, g, or t, or contains no nucleotide
  misc_feature (409)..(410): n includes a, c, g, or t, or contains no nucleotide
tctgttatttcttcatctgctggggggaaaaagtaaattacaaacaaacaaacaaagcagaactaaaatattgggaccatggcagagaaaagcaggagaggagcaaaatganaannantnnnnnnntnnnnnnnnnnnnnnnnnnnnnnnnnnnnnnnnnnnnnnnnnnnnnnnnnnnnnnnnnnnnnnnnnnnnnnnnnnnnnnnnnnnnnnnnnnnnnnnnnnnnnnnnnnnnnnnnnnnnnnnnnnnnnnnnnnnnnnnnnnnnnnnnnnnnnnnnnnnnnnnnnnnnnnnnnnnnnnnnnnnnnnnnnnnnnnnnnnnnnnnnnnnnnnnnnnnnnnnnnnnnnnnnnnnnnnnnnnnnnnnnnnnnnnnnnnnnnnnnnnnnnnnnnnnnnnnnnnnnnnnncnnccaccctcccaccccctggaagaggaagggcccgggcatcagtggctagtccaaataaaatatgggcttggggatggaatgggtggtggtaagttcacagagtgtagttagatcccaactcccatgacctctggcttcagtggtgggtggggcagggcagatgaaagggcttcagtgggaacctctga

SEQ ID NO: 5072 - DNA, 483 bp, Homo sapiens
  misc_feature (33)..(50): n includes a, c, g, or t, or contains no nucleotide
  misc_feature (146)..(146): n includes a, c, g, or t, or contains no nucleotide
  misc_feature (169)..(169): n includes a, c, g, or t, or contains no nucleotide
gacttgcctcactgtgtcccaaaaacaaatcgnnnnnnnnnnnnnnnnnnatagaaaattctgccgtctgaggttttatacttcaggttagttagtttttggaaggaagaacatttttaggtttgcaagcctcctgatcaggaaanccagaaataccacatttatgganccatgaaaggttggttcttgactctgaagggacttttgagttaatcagcgtaaggggatttctaaagcaggcaatccctgtagccgcagagaataaacgccttcccaaaatggcaacttcccacagccacatttcagacctgctgagactgctgagtgaggaatggcagtgaggtttcttcaattagtctcagttctcttaattttcaggaagaaagggaaattgcagctcctcagcccccaggattgacctctggggagtgatggtagcgttggtgccaggccgtgggttcaggtgtggcagaagcttgcaga

SEQ ID NO: 5073 - DNA, 551 bp, Homo sapiens
  misc_feature (127)..(160): n includes a, c, g, or t, or contains no nucleotide
  misc_feature (199)..(213): n includes a, c, g, or t, or contains no nucleotide
  misc_feature (215)..(304): n includes a, c, g, or t, or contains no nucleotide
gcttctgtgctctgtatgctgctgtccccaagggctctttcttattatggcagggagtggggattggtcctactttctttctctggaaaggaaagcctccaagactccatgtgcttgggcagcttgnnnnnnnnnnnnnnnnnnnnnnnnnnnnnnnnnncttgaagcctcacctttagtctatctgcagaggtattcnnnnnnnnnnnnnnngnnnnnnnnnnnnnnnnnnnnnnnnnnnnnnnnnnnnnnnnnnnnnnnnnnnnnnnnnnnnnnnnnnnnnnnnnnnnnnnnnnnnnnnnnngctctatagatgctgaaaaggtatttcgtaagatttaaaatccatcccttattaaaactcttagtaaattaagtctggaaagaaacaccctaatctagataaaggtctgtttcagaaaccaacagtgatggcattctaaagagtcagacgccacaggcattcccattaaagtcagaaactagccaagggcaagctattattcagcagtgtcccggcactactaacccctgcaacaagccagatgagg

SEQ ID NO: 5074 - DNA, 387 bp, Homo sapiens
  misc_feature (95)..(120): n includes a, c, g, or t, or contains no nucleotide
  misc_feature (139)..(228): n includes a, c, g, or t, or contains no nucleotide
  misc_feature (261)..(276): n includes a, c, g, or t, or contains no nucleotide
  misc_feature (289)..(303): n includes a, c, g, or t, or contains no nucleotide
cagccctggacaagacacgttctgccagggcaaagctgatgggctctatcccaatcctcgggaacggtccagcttctacagctgtgcagcggggnnnnnnnnnnnnnnnnnnnnnnnnnnaggcctggtgttcagcaannnnnnnnnnnnnnnnnnnnnnnnnnnnnnnnnnnnnnnnnnnnnnnnnnnnnnnnnnnnnnnnnnnnnnnnnnnnnnnnnnnnnnnnnntcctgggttttccctgggggccgcaatctggcnnnnnnnnnnnnnnnngtggtcttccttnnnnnnnnnnnnnnnctctcagccttgccttccttttttctgggtctcctgggctgcccctttcacttgcaaaataaatctttggtttgtgcccctctt

SEQ ID NO: 5075 - DNA, 573 bp, Homo sapiens
  misc_feature (165)..(166): n includes a, c, g, or t, or contains no nucleotide
  misc_feature (184)..(184): n includes a, c, g, or t, or contains no nucleotide
  misc_feature (191)..(191): n includes a, c, g, or t, or contains no nucleotide
  misc_feature (194)..(194): n includes a, c, g, or t, or contains no nucleotide
  misc_feature (197)..(198): n includes a, c, g, or t, or contains no nucleotide
  misc_feature (202)..(202): n includes a, c, g, or t, or contains no nucleotide
  misc_feature (205)..(205): n includes a, c, g, or t, or contains no nucleotide
  misc_feature (215)..(215): n includes a, c, g, or t, or contains no nucleotide
  misc_feature (244)..(244): n includes a, c, g, or t, or contains no nucleotide
  misc_feature (264)..(264): n includes a, c, g, or t, or contains no nucleotide
  misc_feature (272)..(272): n includes a, c, g, or t, or contains no nucleotide
  misc_feature (281)..(283): n includes a, c, g, or t, or contains no nucleotide
  misc_feature (295)..(295): n includes a, c, g, or t, or contains no nucleotide
  misc_feature (378)..(378): n includes a, c, g, or t, or contains no nucleotide
  misc_feature (544)..(544): n includes a, c, g, or t, or contains no nucleotide
ctgacatgtccaatggatgggaccccaatgaaatgttcaagttcaatgaggagaactacggtgtgaagactacctatgatagcagtctttcttcttatacggtgcccttagaaaaggacaactcagaagagtttcgtcagcgagagctgcgtgcggcccagttgnntcgagagattgaatcaancccccantanccnnctancgnatcgccatgnagaacgacgatgggcgcactgaagaggangaagcacagtgcagtccagncggcaggnctcagggcnnngggagagccccngcttggcatccagggaggggaagtatatccctctgcctcacagagggcagggccagggtccagcaggggtggggggttcctgntctgcccctgcccgtccccacccagtcttgccctcccatcctctcatctattcccccgctggagacggaagatcttttattttctattatttataacttcagacttgggccccctgttctttctttcccattaacttgagtgacctgtgtgagagacagacagatnccccacgaggatggctggacaaggacttt

SEQ ID NO: 5076 - DNA, 445 bp, Homo sapiens
  misc_feature (26)..(44): n includes a, c, g, or t, or contains no nucleotide
  misc_feature (74)..(75): n includes a, c, g, or t, or contains no nucleotide
  misc_feature (80)..(107): n includes a, c, g, or t, or contains no nucleotide
  misc_feature (109)..(113): n includes a, c, g, or t, or contains no nucleotide
  misc_feature (115)..(115): n includes a, c, g, or t, or contains no nucleotide
  misc_feature (117)..(117): n includes a, c, g, or t, or contains no nucleotide
  misc_feature (119)..(124): n includes a, c, g, or t, or contains no nucleotide
  misc_feature (126)..(161): n includes a, c, g, or t, or contains no nucleotide
actacatgctgcagttggtgcttccnnnnnnnnnnnnnnnnnnngctttgttcccaatgacatgcaagttgganngacgnnnnnnnnnnnnnnnnnnnnnnnnnnnntnnnnntngnannnnnngnnnnnnnnnnnnnnnnnnnnnnnnnnnnnnnnnnnnagacaattgtggcaattaataaagacccagaagctccaattttccaagtggcagattatggaatagttgcagatttatttaaggtagttcctgaaatgactgagatattgaagaaaaaatgaatcaggatcatgccttaaaaagaaaacttttgttaaagtattccactgaaatcacagatatttgtgggtattataacaatcattggaaagcatggagagctacatttcataatttgagggaaaatttctaacagatgccagaatgcttgtttatgggattgc

SEQ ID NO: 5077 - DNA, 525 bp, Homo sapiens
  misc_feature (83)..(110): n includes a, c, g, or t, or contains no nucleotide
gagaaaaccaggtcttaagcgtgagaatcgcggacaagaagtactaccccagctcccaggactccagctccgctgcggcgccnnnnnnnnnnnnnnnnnnnnnnnnnnnncagcgctctgctgcagtgagatcccaggaagctggcacatcttggaaggtccgtcctgctcggcttttcgcttgaacattcccttgatctcatcagttctgagcgggtcatggggcaacacggttagcggggagagcacggggtagccggagaagggcctctggagcaggtctggaggggccatggggcagtcctgggtgtggggacacagtcgggttgacccagggctgtctccctccagagcctccctccggacaatgagtcccccctcttgtctcccaccctgagattgggcatggggtgcggtgtggggggcatgtgctgcctgttgttatgggttttttttgcggggggggttgcttttttctggggtctttgagctccaaaaaataaacacttcctttgagggagagca

SEQ ID NO: 5078 - DNA, 578 bp, Homo sapiens
  misc_feature (125)..(125): n includes a, c, g, or t, or contains no nucleotide
  misc_feature (140)..(140): n includes a, c, g, or t, or contains no nucleotide
  misc_feature (151)..(151): n includes a, c, g, or t, or contains no nucleotide
  misc_feature (162)..(162): n includes a, c, g, or t, or contains no nucleotide
  misc_feature (175)..(176): n includes a, c, g, or t, or contains no nucleotide
  misc_feature (209)..(209): n includes a, c, g, or t, or contains no nucleotide
  misc_feature (257)..(257): n includes a, c, g, or t, or contains no nucleotide
  misc_feature (303)..(303): n includes a, c, g, or t, or contains no nucleotide
  misc_feature (389)..(389): n includes a, c, g, or t, or contains no nucleotide
  misc_feature (429)..(429): n includes a, c, g, or t, or contains no nucleotide
tcactcttgctcaagctgttccgtccccttaccacccctgatacaactgccaggttaatttccagaattcttgcaagactcagttcagaagtcaccttctttcgtgaatgttttgattccctganggctactttattttnggtatggctgnaaaaatcctangattttctaaacnnaaaacctgtttgaatcttggttctgatatgganctaggagagagactgggtcaagtaagcttatctccctgaggctgtttncctcgtctgttaagtgtgaatatcaatacctgcctttcataatcanccagggaataaagtggaataatgttgataacagtgcttggcacctggaagtaggtggcagatgttaacgcccttcctcccttgcantgcgccccctgtgcctacctctagcattgtaacgaccacntagtattgaaatggccagtttacttgtctgccttcctttccaagaccgttggtgcctagaggactagaatcgtgtcctatttaactttgtgttcccaggtcctagctcaggagttggcaaataagaattaaatgtctgctacaccgaaa

SEQ ID NO: 5079 - DNA, 70 bp, Homo sapiens
gaacatctcgatgtttgaacctttgttgtgttttgtacagggcattctctgtactagtttgtcgtggtta

SEQ ID NO: 5080 - DNA, 405 bp, Homo sapiens
  misc_feature (43)..(68): n includes a, c, g, or t, or contains no nucleotide
  misc_feature (212)..(230): n includes a, c, g, or t, or contains no nucleotide
  misc_feature (356)..(372): n includes a, c, g, or t, or contains no nucleotide
tatgatcacgtttgccatctttctgtctcttatcatgttggtnnnnnnnnnnnnnnnnnnnnnnnnnntatgtgtttagagataaggtgatgtcagagtttaataacaacttccggcagcagatggagaattacccgaaaaacaaccacactgcttcgatcctggacaggatgcaggcagattttaagtgctgtggggctgctaactacacnnnnnnnnnnnnnnnnnnnttccatgtcgaagaaccgagtccccgactcctgctgcattaatgttactgtgggctgtgggattaatttcaacgagaaggcgatccataaggagggctgtgtggagaagattgggggctggctgannnnnnnnnnnnnnnnnggtagctgcagcagcccttggaattgcttttgt

SEQ ID NO: 5081 - DNA, 401 bp, Homo sapiens
  misc_feature (61)..(161): n includes a, c, g, or t, or contains no nucleotide
  misc_feature (175)..(175): n includes a, c, g, or t, or contains no nucleotide
  misc_feature (177)..(177): n includes a, c, g, or t, or contains no nucleotide
atatccctctataaaactggtggtggagtggcaacttcaggatgacaaaaaccaaagtctnnnnnnnnnnnnnnnnnnnnnnnnnnnnnnnnnnnnnnnnnnnnnnnnnnnnnnnnnnnnnnnnnnnnnnnnnnnnnnnnnnnnnnnnnnnnnnnnnnnnncttgacagcacctncnagctctgctgcttcaacaacagtgacttgctctccaatggtatccagtgattcgttgaagaggaggtgctctgtagcagaaactgagctccgggtggctggttctcagtggttgtctcatgtctctttttctgtcttaggtggtttcattaaatgcagcacttggttagcagatgtttaattttttttttaacaacattaacttgtggcctctttctacacctg

SEQ ID NO: 5082 - DNA, 322 bp, Homo sapiens
  misc_feature (83)..(97): n includes a, c, g, or t, or contains no nucleotide
  misc_feature (142)..(160): n includes a, c, g, or t, or contains no nucleotide
agagggccattccaatctggtgggtgctggtgggtgtgctgggtggcctgctgctgctcaccatcctggtcctggccatgtgnnnnnnnnnnnnnnncaagcggaaccggccacccctggaagaagatgatgaagagggggnnnnnnnnnnnnnnnnnnnctattctagcaggagggttgggcgtgctacctgcaccgccccttctccaacaagttgcctccaagctttgggttggagctgttccattgggtcctcttggtgtcgtttccctcccaacagagctgggctaccccccctcctgctgcctaataaagagactga

SEQ ID NO: 5083 - DNA, 120 bp, Homo sapiens
ttaattcttcagtcatggcattcgcagtgcccagtgatggcattactctgcactatagccatttgccccaacttaagtttagaaattacaagtttcagtaatagctgaacctgttcaaaa

SEQ ID NO: 5084 - DNA, 507 bp, Homo sapiens
  misc_feature (61)..(61): n includes a, c, g, or t, or contains no nucleotide
  misc_feature (72)..(72): n includes a, c, g, or t, or contains no nucleotide
  misc_feature (87)..(87): n includes a, c, g, or t, or contains no nucleotide
  misc_feature (103)..(103): n includes a, c, g, or t, or contains no nucleotide
  misc_feature (109)..(109): n includes a, c, g, or t, or contains no nucleotide
  misc_feature (123)..(123): n includes a, c, g, or t, or contains no nucleotide
  misc_feature (127)..(127): n includes a, c, g, or t, or contains no nucleotide
  misc_feature (142)..(142): n includes a, c, g, or t, or contains no nucleotide
  misc_feature (149)..(149): n includes a, c, g, or t, or contains no nucleotide
  misc_feature (164)..(164): n includes a, c, g, or t, or contains no nucleotide
  misc_feature (167)..(167): n includes a, c, g, or t, or contains no nucleotide
  misc_feature (169)..(169): n includes a, c, g, or t, or contains no nucleotide
  misc_feature (172)..(172): n includes a, c, g, or t, or contains no nucleotide
  misc_feature (179)..(179): n includes a, c, g, or t, or contains no nucleotide
  misc_feature (184)..(184): n includes a, c, g, or t, or contains no nucleotide
  misc_feature (189)..(189): n includes a, c, g, or t, or contains no nucleotide
  misc_feature (200)..(200): n includes a, c, g, or t, or contains no nucleotide
  misc_feature (464)..(464): n includes a, c, g, or t, or contains no nucleotide
  misc_feature (466)..(466): n includes a, c, g, or t, or contains no nucleotide
tagcccccgaagctctgcagaagaagcctgaagacacaaacagacgctcagcagacatgtnggagttttgcnagtgcttctgtgggnaactggtgacacgggnaggtanccctttgctgaccntctnccaatatggagattnggaatgnaaggtggcattgganggncntcnggcctanccatncccanccaggtatttncccctcatgtgtgtaagctcatgaagatctgcatgaatgaagaccctgcaaagcgacccaaatttgacatgattgtgcctatccttgagaagatgcaggacaagtaggactggaaggtccttgcctgaactccagaggtgtcgggacatggttgggggaatgcacctccccaaagcagcaggcctctggttgcctcccccgcctccagtcatggtactaccccagccatggggtccatccccttcccccatccctaccactgtngncccaagaggggcgggctcagagctttgtcacttgccacatg

SEQ ID NO: 5085 - DNA, 336 bp, Homo sapiens
gaaggatctctcttctcatcaattgaatgagtttttagcacagacgctccagagggcacctcttccattggggcacataaagcgaatgcaagaggtgtacaacttcaatgccattaacaattctgaaatacgattcagatggctgcggctctgcattcaatccaagtgggaggacgcaattcctttggcgctaaagatggcaactgaacaaggaagaatgaagtttacccggcccttattcaaggatcttgctgcctttgacaaatcccatgatcaagctgtccgaacctaccaagagcacaaagcaagcatgcatcccgtgactgcaatgctggt

SEQ ID NO: 5086 - DNA, 481 bp, Homo sapiens
  misc_feature (166)..(193): n includes a, c, g, or t, or contains no nucleotide
  misc_feature (353)..(367): n includes a, c, g, or t, or contains no nucleotide
  misc_feature (399)..(422): n includes a, c, g, or t, or contains no nucleotide
catgccttgccgtgacacgggtgtatggcattcagaggttctgccgagacatccacatgatgctgggcttcaagccgggcctctacttcagggcctgctggctgttcctgtccccagccacgctcttggccctcctggtgtatagcatcgtcaagtaccagccctnnnnnnnnnnnnnnnnnnnnnnnnnnnnctgggctgagctgctgggcatcctgatgggcctgctgtcctgcctcatgatcccagctggcatgctggtggctgtgcttcgagaagagggctcactctgggagcggctccaacaggccagccggccggccatggactggggaccatcgctggaggagaannnnnnnnnnnnnnntgtggccacgctggctgggagccagtcaccannnnnnnnnnnnnnnnnnnnnnnnaagtacgggggcatcaccagcttcgagaacacggccatcgaggtggaccgtgagattgc

SEQ ID NO: 5087 - DNA, 540 bp, Homo sapiens
  misc_feature (26)..(40): n includes a, c, g, or t, or contains no nucleotide
  misc_feature (54)..(109): n includes a, c, g, or t, or contains no nucleotide
  misc_feature (189)..(226): n includes a, c, g, or t, or contains no nucleotide
  misc_feature (347)..(401): n includes a, c, g, or t, or contains no nucleotide
aacaccagccaatctgaaaggatatnnnnnnnnnnnnnnnaacagcacctcctnnnnnnnnnnnnnnnnnnnnnnnnnnnnnnnnnnnnnnnnnnnnnnnnnnnnnnnngagaagaaaatgcatttaagtggaaatcggacctctaatccaagcatattgcttgctattaatcgccaaaacaggactgnnnnnnnnnnnnnnnnnnnnnnnnnnnnnnnnnnnnnnaatcattgaaaacgtaccttgaaactctctatctctggacactccagggtagagaatgaagggtatggaagtagtccggcttttgaaacttaggtattttatatttttcccctcaagaacnnnnnnnnnnnnnnnnnnnnnnnnnnnnnnnnnnnnnnnnnnnnnnnnnnnnnnngctttgtttgctgggacaaggcccacaacctgtgcctctcctattgacccttactttgaattcaaagaatctatttaagagtttaatatatgaggctttctttgattcctcctcagttctacctagtttcacagaggaa

SEQ ID NO: 5088 - DNA, 553 bp, Homo sapiens
  misc_feature (409)..(409): n includes a, c, g, or t, or contains no nucleotide
  misc_feature (423)..(423): n includes a, c, g, or t, or contains no nucleotide
  misc_feature (431)..(431): n includes a, c, g, or t, or contains no nucleotide
  misc_feature (442)..(442): n includes a, c, g, or t, or contains no nucleotide
  misc_feature (469)..(469): n includes a, c, g, or t, or contains no nucleotide
  misc_feature (479)..(479): n includes a, c, g, or t, or contains no nucleotide
tcgtgtacatgcttcaagagatcggcatcctggaggactggacagccatcaaaaaggctagggcagctgtgtcccctcagaagagaaaatcggatgacgggcggacccacaggcccctcagggtctgcccagccaggctcctgtggtgctgctgggccctcccactccatctggcactggtctggactcctcctctgccctcctcgaggcctgcacagctgtggccgtggagctgacctgaccaggcaaggctgctgtctccatccctgagccgcctgccacctcccactcctgaagatccatctcttggggctcccctgacagagaagacagccgaagtcaaagccacatcctcttgctgatgttggatgcaggctgtccggcctcagggccagggagccagtttccnctgtgcgggaactntgagtcanacgtgattatntgggggtctgtccaccctggctggatntggaggcaanatgccaggccccccaggtgttctcagggcagttcttggtgtctgcttctcagattccaaggactggaattaaaa

SEQ ID NO: 5089 - DNA, 157 bp, Homo sapiens
  misc_feature (75)..(79): n includes a, c, g, or t, or contains no nucleotide
aacagagattccttcaacactggacacgtcgagcattttgtagcttaattaaacctcatgtaaggccaaaaaaannnnngtatcacactaccttttaccttgtaagtgtttgctctgcctctctggtgagtggacgcatgtccacaggtcacttggt

SEQ ID NO: 5090 - DNA, 336 bp, Homo sapiens
agtgagatgttcttgtcagaaaccgacaaatactccaagtttgatgaaaatggtctgcccacacatgacatggagggcaaagagctcagcaaagggcaagccaagaagctgaagaagctcttcgaggctcaggagaagctctacaaggaatatctgcagatggcccagaatggaagcttccagtgagggggcacaggactgactttttaaaccattgtggactagtggctgctgtctgcctcagtgacaatgtcccagcgctcctatcatgtttacagtcacccttgggtcctaaattaagagttgtgttcatgtaggttcgtgtcgtcgttggct

SEQ ID NO: 5091 - DNA, 547 bp, Homo sapiens
  misc_feature (134)..(149): n includes a, c, g, or t, or contains no nucleotide
ggctccgagactttcatgatcccattgtcgaggttgaggtgtccgtgttcccggccgggacgaccacagcctccagcccccagagctccatgggcacctcaggtcctcccacgaagctgcccgtgcacacctgnnnnnnnnnnnnnnnnaaggacagccccgaacccagcccacaccctggctccctgttcagcaatgtccgcttcctgctcctggtcctcttggagctgcccctgctcctgagcatgctgggtgccgtcctctgggtgaacagacctcagagaagctctagaagcaggcagaattggcccaagggtgagaaccagtagcatctgctgtccatcaaggccctgtgctgcaacagagcccctctggggactggaatgacctcctgaccatcaaggcctgcaacagagcccctctgggggactggaatgacctcctgaccactccctcccgggctgctctctccaacatctcctggaatcctttgtgagcctccttcagccttttccctgtgcccgatccaacatgtgacacatgagga

SEQ ID NO: 5092 - DNA, 545 bp, Homo sapiens
  misc_feature (42)..(42): n includes a, c, g, or t, or contains no nucleotide
  misc_feature (50)..(50): n includes a, c, g, or t, or contains no nucleotide
  misc_feature (61)..(78): n includes a, c, g, or t, or contains no nucleotide
  misc_feature (168)..(168): n includes a, c, g, or t, or contains no nucleotide
  misc_feature (183)..(183): n includes a, c, g, or t, or contains no nucleotide
  misc_feature (205)..(328): n includes a, c, g, or t, or contains no nucleotide
  misc_feature (377)..(378): n includes a, c, g, or t, or contains no nucleotide
  misc_feature (380)..(381): n includes a, c, g, or t, or contains no nucleotide
  misc_feature (403)..(403): n includes a, c, g, or t, or contains no nucleotide
  misc_feature (405)..(405): n includes a, c, g, or t, or contains no nucleotide
  misc_feature (412)..(412): n includes a, c, g, or t, or contains no nucleotide
  misc_feature (415)..(416): n includes a, c, g, or t, or contains no nucleotide
cgtggcaatgagactctgcactatgagaccttcgggaaggcnagcccctnctccgcaggannnnnnnnnnnnnnnnnnacagcacggctgacagagaggatggccaccgcaacttctcctgcctggctgtgctggacttgatgtctcgcggtggcaacatctttcacnaaacactcagccccngaagatgttggagatctatgannnnnnnnnnnnnnnnnnnnnnnnnnnnnnnnnnnnnnnnnnnnnnnnnnnnnnnnnnnnnnnnnnnnnnnnnnnnnnnnnnnnnnnnnnnnnnnnnnnnnnnnnnnnnnnnnnnnnnnnnnnnagcggatgggcacctacggggtgcgagcggcttggaggaggctgccccnngnnttccggccatagcaaccatgantngcatggnccnncaccacggtggtcactggaactcagtgtgactcctcagggttgaggtccagccctggctgaaggactgtgacaggcagcagagacttgggacattgccttttctagcccgaatacaaacacctggactt

SEQ ID NO: 5093 - DNA, 313 bp, Homo sapiens
ggtggacttcttgatgcagctggaagattacacgcctacgatcccagatgcagtgactggttactacctgaaccgtgctggctttgaggcctcagacccacgcataattcggctcatctccttagctgcccagaaattcatctcagatattgccaatgatgccctacagcactgcaaaatgaagggcacggcctccggcagctcccggagcaagagcaaggaccgcaagtacactctaaccatggaggacttgacccctgccctcagcgagtatggcatcaatgtgaagaagccgcactacttcacctgagcc

SEQ ID NO: 5094 - DNA, 548 bp, Homo sapiens
  misc_feature (28)..(28): n includes a, c, g, or t, or contains no nucleotide
  misc_feature (54)..(54): n includes a, c, g, or t, or contains no nucleotide
  misc_feature (61)..(61): n includes a, c, g, or t, or contains no nucleotide
  misc_feature (508)..(517): n includes a, c, g, or t, or contains no nucleotide
ctccagtggttcacagaaaacagcaaantagtccccagcccttgaagtcacccnggccccnatgcaaggtgcccacatgtgtccatcccagcggctggtgcagggcctccattcctggagcccgaggcaccagtgtcctcccctcaaggacaaagtctccagcccacgttctctctgcctgtgagccagtctagttcctgatgacccaggctgcctgagcacctcccagcccctgcccctcatgccaaccccgccctaggcctggcatggcacctgtcgcccagtgccctggggctgatctcagggaagcccagctccagggccagatgagcagaagctctcgatggacaatgaacggccttgctgggggccgccctgtaccctctttcacctttccctaaagaccctaaatctgaggaatcaacagggcagcagatctgtatatttttttctaagagaaaatgtaaataaaggatttctagatgaaaaaaaaaaaaaaaaaaaaaannnnnnnnnncgcatttctcaggcgaggaacctgagacaat

SEQ ID NO: 5095 - DNA, 396 bp, Homo sapiens
  misc_feature (76)..(76): n includes a, c, g, or t, or contains no nucleotide
  misc_feature (104)..(104): n includes a, c, g, or t, or contains no nucleotide
  misc_feature (219)..(233): n includes a, c, g, or t, or contains no nucleotide
tccccaagtgtgcaagctcagtattcatgatggtgggggatggagtgtcttccgaggttcttgggggaaaaaaaanttgtagcatatttaagggaggcaatganccctctcccccacctcttccctgcccaaatctgtctcctagaatcttatgtgctgtgaataataggccttcactgcccctccagtttttatagacctgaggttccagtgtctccnnnnnnnnnnnnnnnctcctgagggggaatcctggtgctcaaattaccctccaaaagcaagtagccaaagccgttgccaaaccccacccataaatcaatgggccctttatttatgacgactttatttattctaatatgattttatagtatttatatatattgggtcgtctgcttccct

SEQ ID NO: 5096 - DNA, 510 bp, Homo sapiens
catgccctcaactcttgcttggcaggggtaccagagactgaaagacacggcacaaatctcaatattcatctcccacatcaccttccctgggaactggacagggtgaaagtcctcaaactctgggaacaggcgagatggaacagggatttaactccccgcccacaggtccatgggagcttgaggcagtaagggggatcccaggcacccatctcaaggagtggctgggagtcttttccctaacttgtggggacaccaccagttgtcaagctactaggcagtagggtctgagggctcaggcctccacctgagaggttataacctgagagacagctctacccttcctcccagtaagaagggaaggtgggtgggcacctgagagattaagactattctcccagtcccactaccagcacccccgatccctgagactgaggggtttacgggctgtgaatggaccttcagccctgcccaccctccctccccactgctgctgagtctgtctgatgtttt

SEQ ID NO: 5097 - DNA, 608 bp, Homo sapiens
  misc_feature (49)..(73): n includes a, c, g, or t, or contains no nucleotide
  misc_feature (104)..(122): n includes a, c, g, or t, or contains no nucleotide
gctcacctggctctggagggctgccctgcagctgggcctggggacaggnnnnnnnnnnnnnnnnnnnnnnnnntccctgaggctcacggtggctccgagcatgnnnnnnnnnnnnnnnnnnngacccagcagtggacagcacggtcctcacacccagctccctgcacacccaggccagccacccctcccgctcgtgcacaggcacgcagatgcgctcacacgtacacacacacaaatgcacgcccacttgcacatgctcacgcacacgttcacacatgcacactcacgctcacacatgctgtcacgcatacacacacgcacatactcctgcacatgttcccatgcatgtgtgtgcactcggaccgagcatctcccacgcacctctaccccaccccaagcacctctctccccccatgcacctctccccaacaacacacacagccccctgcaccgcccgccccccgcccccaccaaggccccagcctctggccatcagtcctggtgccagagctttgcgtgaagttcgggccgcagagtggcccgctgggactcccatgtgctgccgtctgatgtgctcagatgggctcatcgttggttcgtttttactg

SEQ ID NO: 5098 - DNA, 354 bp, Homo sapiens
  misc_feature (194)..(226): n includes a, c, g, or t, or contains no nucleotide
tcaagatccctgagtgagggccaccccacggcccagcatgagaaaatgctctgtgacacctggtgtatcgaggctgcagctcggatccgagagggcatggccgccctgcagtctgacccctggcagcaagagctctaccgcaacttcaaaagcatctccaaggccttggtggagcggggtggtgtggtcaccannnnnnnnnnnnnnnnnnnnnnnnnnnnnnnnnagggcctgtcccagttatgtgccttccctcaagccaaagccgaagcccctttccttaaggccctggtttgtcccgaaggggcctagtgttcccagcactgtgcctgctctcaagagcacttactgcct

SEQ ID NO: 5099 - DNA, 376 bp, Homo sapiens
  misc_feature (35)..(35): n includes a, c, g, or t, or contains no nucleotide
  misc_feature (85)..(85): n includes a, c, g, or t, or contains no nucleotide
  misc_feature (215)..(215): n includes a, c, g, or t, or contains no nucleotide
  misc_feature (234)..(234): n includes a, c, g, or t, or contains no nucleotide
ctcactggtcaataatggtgttgatgaaacccttnaagaaattacaagaagccttcgaccaagcgtgcagttctccacagtgggngcctgtctcctgggtttactaagcttgtagaatgggggaacccactgtatgcccctctccagcatttggaattccacccgccttgctttaagacaaacagggctgctccaactagttttgtgtcagcttnccagctctctgcagctatncctaattcagccagtaaggttcagtcttcttgctcaggctcctgaagggttgattctcctgatagatggggccccactgatctggatttgaaaaggatttctagaaattgggggtaagaagtactaccaaaatgtaactgct

SEQ ID NO: 5100 - DNA, 541 bp, Homo sapiens
  misc_feature (68)..(102): n includes a, c, g, or t, or contains no nucleotide
  misc_feature (281)..(316): n includes a, c, g, or t, or contains no nucleotide
caagtctatgaggaccttgagggttggtttcaggcctgagatccgctggccgggggaggtgggtgtgnnnnnnnnnnnnnnnnnnnnnnnnnnnnnnnnnnngcatccggcccttaccggcaagcagcgggctaacgggaggctgggcacagaggtcaggaagcaggggtggggggtgcaggtgggcactggagcatgcagaggaggtgagagtgggagggaggtaacgggtgcctgctgcggcagacgggaggggaaaggctgccgaggaccctccccannnnnnnnnnnnnnnnnnnnnnnnnnnnnnnnnnnngaagagggtgaaaggcagggcccttggggctggggggcaccccagcctgaagtttgtgggggccaaacctgggaccccgagcttcctcggtagcagaggccctgtggtccccgagacacaggcacgggtccctgccacgtccatagttctgaggtccctgtgtgtaggctggggcggggcccaggagaccacggggagcaaaccagcttgttctgggctcaggga

SEQ ID NO: 5101 - DNA, 492 bp, Homo sapiens
  misc_feature (120)..(134): n includes a, c, g, or t, or contains no nucleotide
  misc_feature (191)..(191): n includes a, c, g, or t, or contains no nucleotide
  misc_feature (290)..(337): n includes a, c, g, or t, or contains no nucleotide
agaacttgaagttcaacttcctctgtaaatatccaagtataaagcccaggaacttctagaataacccagatgcgctttaattttttttaatatgttttgatcacagaacttctagaatannnnnnnnnnnnnnncatattcttttaatacatcttgatcacagctgggggaaaaaaagctttttaattctntaccttcctagtagataagtgaagagcagggaaagagacctttaaatattttgctataaaaaaatttgtgataagtttctatcaaaatggggagattgnnnnnnnnnnnnnnnnnnnnnnnnnnnnnnnnnnnnnnnnnnnnnnnnatattagtgccatgtgcctttcacacagggtttgcatttatcagtctgttttccgatgatgtgtacatgaaagagtacaccatgtgaagagaagagagaatgattgaaaatgttttagtatagaactcttcttgcagtgggttgctattttctag

SEQ ID NO: 5102 - DNA, 472 bp, Homo sapiens
caattgaactgcttcagaaagcacagatggatagctcccagttgatccattgtcgggagcttgtggcacatcacctttctactctgcagtcttccctgcctctgaattccgtttatgtctaccgtcccctcaagcacaccctggtgacctgtgacaaaggagtgttcagattacatccctcctctgtcccaggcccagacttctccaaggacaacagcaagccagaagtgccagtcagaggtacagcagccttttaccatcatctcccagctgccagtgggtgcaagcagacctctactaaacgcaaagtagaggaaatggaagtggatgacttctatgatggaatcaaacggctctataatgaagataatgtctcagaaaatgtgggttctgtgtgtggcactgatttatcaagacaagagggacatgcttccccttgtccacctttgcagcctgtttctgtcatgtagtt

SEQ ID NO: 5103 - DNA, 268 bp, Homo sapiens
  misc_feature (188)..(227): n includes a, c, g, or t, or contains no nucleotide
agtttcagctatcaggacaaaagctctttatccctcagattactccaaagcataatgggctctatgcttgctctgctcgtaactcagccactggcgaggaaagctccacatccttgacaatcagagtcattgctcctccaggattaggaactttttgctttcaataatccaagtagcagccctgatgnnnnnnnnnnnnnnnnnnnnnnnnnnnnnnnnnnnnnnnnaaaagactatgaaaaggactcttgaatacaagttcctgata

SEQ ID NO: 5104 - DNA, 311 bp, Homo sapiens
  misc_feature (111)..(111): n includes a, c, g, or t, or contains no nucleotide
  misc_feature (113)..(115): n includes a, c, g, or t, or contains no nucleotide
  misc_feature (117)..(117): n includes a, c, g, or t, or contains no nucleotide
  misc_feature (122)..(122): n includes a, c, g, or t, or contains no nucleotide
  misc_feature (126)..(126): n includes a, c, g, or t, or contains no nucleotide
  misc_feature (173)..(173): n includes a, c, g, or t, or contains no nucleotide
  misc_feature (196)..(245): n includes a, c, g, or t, or contains no nucleotide
  misc_feature (265)..(265): n includes a, c, g, or t, or contains no nucleotide
agaagtctctcatcacttttgtgaacaagcacctgaacaagctgaatttggaggtgacggaactggagacccagtttgcagatggcgtgtacctggttctgctcatgggcntnnngnaagantacnttgttcctctccaccacttctacctgactccggaaagcttcgatcanaaggtccacaatgtgtccttcgnnnnnnnnnnnnnnnnnnnnnnnnnnnnnnnnnnnnnnnnnnnnnnnnnnctgaagacgtggttaacttnggacctcaaatccaccctgagggttctttacaacctgttcaccaag

SEQ ID NO: 5105 - DNA, 49 bp, Homo sapiens
tcaccgtggcgcagaatgagcgcttcgatgcggactatgcggagaagat

SEQ ID NO: 5106 - DNA, 439 bp, Homo sapiens
  misc_feature (38)..(38): n includes a, c, g, or t, or contains no nucleotide
  misc_feature (162)..(162): n includes a, c, g, or t, or contains no nucleotide
  misc_feature (213)..(213): n includes a, c, g, or t, or contains no nucleotide
  misc_feature (251)..(254): n includes a, c, g, or t, or contains no nucleotide
aaagctacgacatggagagtgtcctgcgcaacctgggncatgactgatgccttcgagctgggcaaggcagacttctctggaatgtcccagacagacctgtctctgtccaaggtcgtgcacaagtcttttgtggaggtcaatgaggaaggcacggaggctgcnagccgccacagctgccatcatgatgatgcggtgtgccagattcgtcccccngcttctgcgccgaccaccccttccttttcttcatccannnngcacagcaagaccaacgggattctcttctgcggccgcttttcctctccgtgaggacagggcagtcttggtgtgcagcccctctcctctctgtcccctgacactccacagtgtgcctgcaacccaagtggccttatccgtgcagtggtggcagttcagaaataaagggcccatttgtgggatgccg

SEQ ID NO: 5107 - DNA, 38 bp, Homo sapiens
tgaaccacattgtgcaaaccttctctcctgtcaacagc

SEQ ID NO: 5108 - DNA, 170 bp, Homo sapiens
  misc_feature (27)..(27): n includes a, c, g, or t, or contains no nucleotide
  misc_feature (62)..(62): n includes a, c, g, or t, or contains no nucleotide
  misc_feature (67)..(67): n includes a, c, g, or t, or contains no nucleotide
gcgctagacaaggatagtggctacccngagacgctggtcaacctcatcgtcctgtcccagcnacctnggcaagccccctgaggtgacaaaccgatacctgtcccagctgaaggatgcccacaggtcccatcccttcatcaaggagtaccaggccaaggagaacgactttg

SEQ ID NO: 5109 - DNA, 585 bp, Homo sapiens
  misc_feature (42)..(42): n includes a, c, g, or t, or contains no nucleotide
  misc_feature (44)..(47): n includes a, c, g, or t, or contains no nucleotide
  misc_feature (49)..(49): n includes a, c, g, or t, or contains no nucleotide
  misc_feature (52)..(62): n includes a, c, g, or t, or contains no nucleotide
  misc_feature (64)..(65): n includes a, c, g, or t, or contains no nucleotide
  misc_feature (67)..(71): n includes a, c, g, or t, or contains no nucleotide
  misc_feature (73)..(76): n includes a, c, g, or t, or contains no nucleotide
  misc_feature (78)..(81): n includes a, c, g, or t, or contains no nucleotide
  misc_feature (83)..(88): n includes a, c, g, or t, or contains no nucleotide
  misc_feature (90)..(94): n includes a, c, g, or t, or contains no nucleotide
  misc_feature (96)..(96): n includes a, c, g, or t, or contains no nucleotide
  misc_feature (98)..(125): n includes a, c, g, or t, or contains no nucleotide
  misc_feature (132)..(132): n includes a, c, g, or t, or contains no nucleotide
  misc_feature (343)..(343): n includes a, c, g, or t, or contains no nucleotide
  misc_feature (370)..(370): n includes a, c, g, or t, or contains no nucleotide
  misc_feature (400)..(400): n includes a, c, g, or t, or contains no nucleotide
  misc_feature (423)..(478): n includes a, c, g, or t, or contains no nucleotide
  misc_feature (501)..(501): n includes a, c, g, or t, or contains no nucleotide
acatggtcccaggtgccgggccctataccagtacgtgggccnannnntngannnnnnnnnnntnnannnnnannnngnnnntnnnnnncnnnnngnannnnnnnnnnnnnnnnnnnnnnnnnnnnttcacgnccaggagggccttttcccaggaaactacgtggagaagatctgagctgggccctgggatactgccttctctttcgcccgcctatctgcctgccggcctggtggggagccaggccctgccaatgagagcctcgtttacctgggctgcaatagcctaaaagtccagtcctttggcctccagtcctgcccaggccctgggtcaccaggtcactgntgcagcccccgcccctgggccctggtnttcctccaacatcacacctgctgcccattntccatttctgtgtgtgtcaaagnnnnnnnnnnnnnnnnnnnnnnnnnnnnnnnnnnnnnnnnnnnnnnnnnnnnnnnnagtcctgtgctgttggcaaagtnccaggcacagttggggaggggggggtccttaacaagcgtgactttgctcattctgtcatcactaaggcaataaacctttgccag

SEQ ID NO: 5110 - DNA, 398 bp, Homo sapiens
  misc_feature (82)..(100): n includes a, c, g, or t, or contains no nucleotide
  misc_feature (102)..(103): n includes a, c, g, or t, or contains no nucleotide
  misc_feature (114)..(117): n includes a, c, g, or t, or contains no nucleotide
  misc_feature (119)..(119): n includes a, c, g, or t, or contains no nucleotide
  misc_feature (121)..(121): n includes a, c, g, or t, or contains no nucleotide
  misc_feature (142)..(142): n includes a, c, g, or t, or contains no nucleotide
  misc_feature (149)..(152): n includes a, c, g, or t, or contains no nucleotide
  misc_feature (154)..(156): n includes a, c, g, or t, or contains no nucleotide
  misc_feature (158)..(160): n includes a, c, g, or t, or contains no nucleotide
  misc_feature (163)..(163): n includes a, c, g, or t, or contains no nucleotide
  misc_feature (165)..(170): n includes a, c, g, or t, or contains no nucleotide
  misc_feature (172)..(176): n includes a, c, g, or t, or contains no nucleotide
  misc_feature (178)..(179): n includes a, c, g, or t, or contains no nucleotide
  misc_feature (181)..(181): n includes a, c, g, or t, or contains no nucleotide
  misc_feature (183)..(188): n includes a, c, g, or t, or contains no nucleotide
  misc_feature (190)..(226): n includes a, c, g, or t, or contains no nucleotide
  misc_feature (323)..(351): n includes a, c, g, or t, or contains no nucleotide
gtgatccttatcagggagagcaggaatccttattcccggtgtcgctagtactcatctctgccgcctcctgtctgcccccagnnnnnnnnnnnnnnnnnnncnncgaacccgcgnnnnancntgtcccgactctagccgcctnttcagcnnnncnnngnnnccnannnnnncnnnnncnncngnnnnnncnnnnnnnnnnnnnnnnnnnnnnnnnnnnnnnnnnnnnaaatgcacctcctgcaagaaaagctgctgctcctgctgccctgtgggctgtgccaagtgtgcccagggctgcatctgcaaaggggcgtcggacaagnnnnnnnnnnnnnnnnnnnnnnnnnnnnnccccgctcccagatgtaaagaacgcgacttccacaaacctggatttt

SEQ ID NO: 5111 - DNA, 604 bp, Homo sapiens
  misc_feature (161)..(297): n includes a, c, g, or t, or contains no nucleotide
tccacagggaaatgggcagactgaaccagtccaggtggtgaattttccaagaacatagtttaagttgattaaaaatgcttttagaatgcaggagcctacttctagctgtattttttgtatgcttaaataaaataaaattcataaccaagagatccacattnnnnnnnnnnnnnnnnnnnnnnnnnnnnnnnnnnnnnnnnnnnnnnnnnnnnnnnnnnnnnnnnnnnnnnnnnnnnnnnnnnnnnnnnnnnnnnnnnnnnnnnnnnnnnnnnnnnnnnnnnnnnnnnnnnnnnnnnnagatgacctgtggtaagcaacctggcatcttaggaagcagtccttgagaaggcatgttccagaaaggtctctgaggacaaactcactcagtaaaacataatgtatcatgaagaaaactgattctctatgacatgaaatgaaaattttaatgcattgttataattactaatgtacgctgctgcaggacattaataaagttgcttttttaggctacagtgtctcgatgccataatcagaacacactttttttcctctttctcccagcttcaaatgcacaattcatcattgggctcacttctaataactg

SEQ ID NO: 5112 - DNA, 118 bp, Homo sapiens
agctcaatgctacacagagcacggacttttggattctttgcagtactttgaatttatttttctacctatatatgttttatatgctgctggtgctccattaaagttttactctgtgttg

SEQ ID NO: 5113 - DNA, 455 bp, Homo sapiens
  misc_feature (67)..(67): n includes a, c, g, or t, or contains no nucleotide
  misc_feature (126)..(126): n includes a, c, g, or t, or contains no nucleotide
  misc_feature (200)..(200): n includes a, c, g, or t, or contains no nucleotide
  misc_feature (354)..(354): n includes a, c, g, or t, or contains no nucleotide
  misc_feature (356)..(360): n includes a, c, g, or t, or contains no nucleotide
  misc_feature (362)..(364): n includes a, c, g, or t, or contains no nucleotide
  misc_feature (366)..(367): n includes a, c, g, or t, or contains no nucleotide
  misc_feature (369)..(371): n includes a, c, g, or t, or contains no nucleotide
  misc_feature (373)..(375): n includes a, c, g, or t, or contains no nucleotide
  misc_feature (377)..(381): n includes a, c, g, or t, or contains no nucleotide
  misc_feature (383)..(392): n includes a, c, g, or t, or contains no nucleotide
  misc_feature (394)..(394): n includes a, c, g, or t, or contains no nucleotide
  misc_feature (396)..(410): n includes a, c, g, or t, or contains no nucleotide
tgcatcccacgttctgttaatttagtaaataaacaagtcaaagacttgtggaaaataggaagtgaancccatattttaaattctcataagtagcattcatgtaataaacaggtttttagtttgttncttcagattgatagggagttttaaagaaattttagtagttactaaaattatgttactgtatttttcagaaatcnaactgcttatgaaaagtactaatagaacttgttaacctttctaaccttcacgattaactgtgaaatgtacgtcatttgtgcaagaccgtttgtccacttcattttgtataatcacagttgtgttcctgacactcaataaacagtcattggaaanannnnnannnannannnannnannnnnannnnnnnnnnanannnnnnnnnnnnnnnaggaggggggttattatcaagaaatacaagctgaacatcgtatct

SEQ ID NO: 5114 - DNA, 327 bp, Homo sapiens
  misc_feature (26)..(26): n includes a, c, g, or t, or contains no nucleotide
  misc_feature (71)..(71): n includes a, c, g, or t, or contains no nucleotide
cagtgtgacgtttctggctggcaatncggatgctggcccagcaggcagtcaagagaacagcacattagttnccagaagaaagatggaaattctgaaaactgaatgtcaagaaaaggagtcaagaacaattcacagtatgagaagaaaaatggaaaaaaaaaactttatttaaaaaagaaaaaagtccagattgtagttatacttttgcttgtttttcagtttccccaacacacagcagatacctggtgagctcagatagtctctttctctgacactgtgtaagaagctgtgaatattcctaacttacccagatgttgcttttgaaaa

SEQ ID NO: 5115 - DNA, 535 bp, Homo sapiens
  misc_feature (26)..(53): n includes a, c, g, or t, or contains no nucleotide
  misc_feature (134)..(134): n includes a, c, g, or t, or contains no nucleotide
  misc_feature (150)..(150): n includes a, c, g, or t, or contains no nucleotide
  misc_feature (157)..(157): n includes a, c, g, or t, or contains no nucleotide
  misc_feature (172)..(172): n includes a, c, g, or t, or contains no nucleotide
  misc_feature (180)..(180): n includes a, c, g, or t, or contains no nucleotide
  misc_feature (187)..(187): n includes a, c, g, or t, or contains no nucleotide
  misc_feature (197)..(197): n includes a, c, g, or t, or contains no nucleotide
  misc_feature (205)..(205): n includes a, c, g, or t, or contains no nucleotide
  misc_feature (215)..(215): n includes a, c, g, or t, or contains no nucleotide
  misc_feature (236)..(236): n includes a, c, g, or t, or contains no nucleotide
  misc_feature (253)..(253): n includes a, c, g, or t, or contains no nucleotide
  misc_feature (308)..(308): n includes a, c, g, or t, or contains no nucleotide
  misc_feature (341)..(341): n includes a, c, g, or t, or contains no nucleotide
  misc_feature (351)..(351): n includes a, c, g, or t, or contains no nucleotide
  misc_feature (373)..(373): n includes a, c, g, or t, or contains no nucleotide
  misc_feature (378)..(379): n includes a, c, g, or t, or contains no nucleotide
  misc_feature (384)..(384): n includes a, c, g, or t, or contains no nucleotide
  misc_feature (389)..(389): n includes a, c, g, or t, or contains no nucleotide
  misc_feature (471)..(487): n includes a, c, g, or t, or contains no nucleotide
ctgtcttcagcgtgaactaaagttcnnnnnnnnnnnnnnnnnnnnnnnnnnnncaagaactcgtcaaacagctcgataagcctttttgactgtgtacatctgtaccgggaataacattcctaggctgaaatttnccacaaagaatagaancctgtancccagttcttcaggnctgatttnccctgancctcttgggncatttgtnatttgtagtnaaagtattgcagagattcctnaagtattttatagcagnccatcaaaattggactttgtattgtttattcataaaagacacttggtaatagacnttcagtgaactctgtatgaatgcagtagtgtgngtgcaaaatnccgcttcctgagcgtagggtgnctganntggcngctangggctcggttgtgaaatacagcgtagtcagcccttgcgctcagtgtagaaacccacgtctgtaaggtcggtcttcgtccatnnnnnnnnnnnnnnnnntacactaagagcagccacaaaactgtaacctcaaggaaaccataaagc

SEQ ID NO: 5116 - DNA, 601 bp, Homo sapiens
  misc_feature (48)..(48): n includes a, c, g, or t, or contains no nucleotide
  misc_feature (231)..(231): n includes a, c, g, or t, or contains no nucleotide
  misc_feature (308)..(327): n includes a, c, g, or t, or contains no nucleotide
  misc_feature (367)..(368): n includes a, c, g, or t, or contains no nucleotide
  misc_feature (504)..(504): n includes a, c, g, or t, or contains no nucleotide
  misc_feature (545)..(545): n includes a, c, g, or t, or contains no nucleotide
  misc_feature (547)..(547): n includes a, c, g, or t, or contains no nucleotide
  misc_feature (549)..(553): n includes a, c, g, or t, or contains no nucleotide
  misc_feature (557)..(563): n includes a, c, g, or t, or contains no nucleotide
  misc_feature (565)..(565): n includes a, c, g, or t, or contains no nucleotide
actaactgctagaagagaagactctgggttatactggtgcgaggctgnccacagaggatggaaatgtccttaagcgcagccctgagttggagcttcaagtgcttggcctccagttaccaactcctgtctggtttcatgtccttttctatctggcagtgggaataatgtttttagtgaacactgttctctgggtgacaatacgtaaagaactgaaaagaaagaaaaagtggnatttagaaatctctttggattctggtcatgagaagaaggtaatttccagccttcaagaagacagacatttagaagannnnnnnnnnnnnnnnnnnnaaaaagaagaacagctgcaggaaggggtgcaccggaaggnnccccagggggccacgtagcagcggctcagtgggtggccatcgatctggaccgtcccctgcccacttgctccccgtgagcactgcgtacaaacatccaaaagttcaacaacaccagaactgtgtgtctcatggtatntaactcttaaagcaaataaatgaactgacttcaactgggananannnnnaaannnnnnnancaaagatgacttgaaatgaggcctactctaaagaat

SEQ ID NO: 5117 - DNA, 265 bp, Homo sapiens
  misc_feature (32)..(47): n includes a, c, g, or t, or contains no nucleotide
  misc_feature (137)..(212): n includes a, c, g, or t, or contains no nucleotide
aagagtgcgccctctactggagggcgaagaannnnnnnnnnnnnnnncctggtactgtggcactccgtgaaattagccattatcagacatctactgaactgattcgcaaacttcccttccagcatctggtgtgagannnnnnnnnnnnnnnnnnnnnnnnnnnnnnnnnnnnnnnnnnnnnnnnnnnnnnnnnnnnnnnnnnnnnnnnnnnnctatctggttggctttttgaagacaccaacctgtgtgctgtccgtcgacgcgg

SEQ ID NO: 5118 - DNA, 421 bp, Homo sapiens
tcggaccccatatcatgtgaacctcctcctggctggctatgatgagcatgaagggccagcgctgtattacatggactacctggcagccttggccaaggccccttttgcagcccacggctatggtgccttcctgactctcagtatcctcgaccgatactacacaccgactatctcacgtgagagggcagtggaactccttaggaaatgtctggaggagctccagaaacgcttcatcctgaatctgccaaccttcagtgttcgaatcattgacaaaaatggcatccatgacctggataacatttccttccccaaacagggctcctaacatcatgtcctccctcccacttgccagggaacttttttttgatgggctcctttatttttttctactcttttcaggcgcactcttgataaatggtta

SEQ ID NO: 5119 - DNA, 373 bp, Homo sapiens
  misc_feature (69)..(69): n includes a, c, g, or t, or contains no nucleotide
  misc_feature (222)..(289): n includes a, c, g, or t, or contains no nucleotide
gagtgtggtcccacaggatatgtagagaaaatcacatgcagctcatctaagagaaatgagttcaaaagntgccgctcagctttgatggaacaacgcttattttggaagttcgaaggggctgtcgtgtgtgtggccctgatcttcgcttgtcttgtcatcattcgtcagcgacaattggacagaaaggctctggaaaaggtccggaagcaaatcgagtccatnnnnnnnnnnnnnnnnnnnnnnnnnnnnnnnnnnnnnnnnnnnnnnnnnnnnnnnnnnnnnnnnnnnnctgatttgcactcttggttctttggagccttgtggtggaatccccttttccccatcttcttctttcagatcattaatgagcaga

SEQ ID NO: 5120 - DNA, 496 bp, Homo sapiens
  misc_feature (239)..(239): n includes a, c, g, or t, or contains no nucleotide
  misc_feature (464)..(465): n includes a, c, g, or t, or contains no nucleotide
  misc_feature (468)..(471): n includes a, c, g, or t, or contains no nucleotide
tccctctgccagtcgggagagccaggcttggatggaacatgcccacaacttgtcacccaaagcctgtcccaggactcaccctccacaaagcaaaggcagtcccgggagaaaagacggatggcaggatccaaggggctagctggatttgtttgttttcttgtctgtgtgattttcatacaggttatttttacgatctgtttccaaatccctttcatgtctttccacttctctgggtcccnggggtgcatttgttactcatcgggcccagggacattgcagagtggcctagagcactctcaccccaagcggccttttccaaatgcccaaggatgccttagcatgtgactcctgaagggaaggcaaaggcagaggaatttggctgcttctacggccatgagactgatccctggccactgaaaagctttcctgacaataaaaatgttttgaggctttaaaaagaaaannaannnngaccagtgcagtttctaagcatgta

SEQ ID NO: 5121 - DNA, 216 bp, Homo sapiens
  misc_feature (33)..(77): n includes a, c, g, or t, or contains no nucleotide
gccatacgctggacgagtcggaccgaggctagnnnnnnnnnnnnnnnnnnnnnnnnnnnnnnnnnnnnnnnnnnnnngcgcgcggatcctcgctccgttgcacgggcgccttaagttattggactatctaatatctatgtatttatttcgctggttctttgtagtcacatattttatagtcttaatatcttgtttttgcatcactgtgcccattgc

SEQ ID NO: 5122 - DNA, 344 bp, Homo sapiens
  misc_feature (103)..(103): n includes a, c, g, or t, or contains no nucleotide
  misc_feature (109)..(109): n includes a, c, g, or t, or contains no nucleotide
  misc_feature (112)..(113): n includes a, c, g, or t, or contains no nucleotide
  misc_feature (115)..(115): n includes a, c, g, or t, or contains no nucleotide
  misc_feature (124)..(124): n includes a, c, g, or t, or contains no nucleotide
  misc_feature (152)..(182): n includes a, c, g, or t, or contains no nucleotide
cacactaggcaatgccatttcaatgcattactaaatgacatttgtagttcctagctcctcttaggaaaacagttcttgtggccttctattaaatactttgcancttaanccnngnccagtgttnctgagcttttcaataatcagtttactgnnnnnnnnnnnnnnnnnnnnnnnnnnnnnnntcacatgagatgtgtgggtggttgtttttggtctctgttgtcactaaagactaaatgagggtttgcagttgggaaagaggtcaactgagatttggaaatcatctttgtaatatttgcaaattatacttgttcttatctgtgtcctaaagatgtgttctctat

SEQ ID NO: 5123 - DNA, 477 bp, Homo sapiens
  misc_feature (37)..(53): n includes a, c, g, or t, or contains no nucleotide
  misc_feature (55)..(55): n includes a, c, g, or t, or contains no nucleotide
  misc_feature (323)..(381): n includes a, c, g, or t, or contains no nucleotide
  misc_feature (386)..(400): n includes a, c, g, or t, or contains no nucleotide
  misc_feature (436)..(436): n includes a, c, g, or t, or contains no nucleotide
tcaggctgtttgagctgagtgagctgcgtgagggccnnnnnnnnnnnnnnnnngntgcgccctgagccggggctggttttctatgaacgattccggcctgggatgcgggccaggctgcaggcggcatagttgggcccattcgtcctggaaagggactggggggtcccaacttagccctgggtgggccgggccgggctgggctggggtgggccccagtcggctctggttgttggcagctttggggctgtttttgagcttctcattgtgtagaatttctagatcccccgattacatttctaagcgtgaaaaaaaaaaaaaaaaannnnnnnnnnnnnnnnnnnnnnnnnnnnnnnnnnnnnnnnnnnnnnnnnnnnnnnnnnncatannnnnnnnnnnnnnnacactattaaccaacttgacctagccaacatatgtngcacactctacatactgactagaatacacattcatttcagg

SEQ ID NO: 5124 - DNA, 114 bp, Homo sapiens
ttgcttttttaggctacagtgtctcgatgccataatcagaacacactttttttcctctttctcccagcttcaaatgcacaattcatcattgggctcacttctaataactgcagt

SEQ ID NO: 5125 - DNA, 502 bp, Homo sapiens
  misc_feature (140)..(154): n includes a, c, g, or t, or contains no nucleotide
  misc_feature (285)..(314): n includes a, c, g, or t, or contains no nucleotide
  misc_feature (393)..(394): n includes a, c, g, or t, or contains no nucleotide
  misc_feature (404)..(404): n includes a, c, g, or t, or contains no nucleotide
  misc_feature (412)..(412): n includes a, c, g, or t, or contains no nucleotide
  misc_feature (434)..(434): n includes a, c, g, or t, or contains no nucleotide
  misc_feature (452)..(469): n includes a, c, g, or t, or contains no nucleotide
gcgtgagacgccaccattcctggaaaccacagtccacctgctcattctcgtagctttttaaaaaaatgaaagtaaaggaaaaaaaaaaaactgcaaatctagaaaactttttagagaaaaactatttaaaactgtcagannnnnnnnnnnnnnnccccccccagccccccttccaagtgactccgtgccttgagtgtgtctgcgtgtttacacccgtccctctgctggccgcccccgtgcgagcggcacccctgccctgccctccacagaattgggttccaaggnnnnnnnnnnnnnnnnnnnnnnnnnnnnnngggccctgccccagcggccctggccccaggctctattaacctaaaatgtagctccctagcgctaacctaggaaccgccnngctgcctgcntggggggnccacgcccctcatgcccttgtncccaggcccggggccttnnnnnnnnnnnnnnnnnntgcttttttcacatgttttatggaattgttcac

SEQ ID NO: 5126 - DNA, 113 bp, Homo sapiens
ttggccctgcagcatgtcatgctcccagaatttcagcttcagcttaactgacagatgttaaagctttctggttagattgttttcacttggtgatcatgtcttttccatgtgta

SEQ ID NO: 5127 - DNA, 493 bp, Homo sapiens
  misc_feature (34)..(63): n includes a, c, g, or t, or contains no nucleotide
cctctctttattccatgattaagggagatacatnnnnnnnnnnnnnnnnnnnnnnnnnnnnnntctgtggagaagatgactaacgtgtcacggggaagagctccctgctgtgtgcctgcaccaccccactgccttccttcagcacctttagctgcatttgtatgccagtgcttaacacattgccttattcatactagcatgctcatgaccaacacatacacgtcatagaagaaaatagtggtgcttctttctgatctctagtggagatctctttgactgctgtagtactaaagtgtacttaatgttactaagtttaatgcctggccattttccatttatatatattttttaagaggctagagtgcttttagccttttttaaaaactccatttatattacatttgtaaccatgatactttaatcagaagcttagccttgaaattgtgaactcttggaaatgttattagtgaagttcgcaactaaactaaacctg

SEQ ID NO: 5128 - DNA, 169 bp, Homo sapiens
  misc_feature (45)..(60): n includes a, c, g, or t, or contains no nucleotide
cctattaagtacagccgcaagaaagaaaaaatgatgaagttgcannnnnnnnnnnnnnnntcacctgcaacagaagtgcgtaccagaagtatgactcatgcaaagcattttaccgtacaaatatcctggtgcgatgatgggcctggcaacattttctactgtacttttg

SEQ ID NO: 5129 - DNA, 591 bp, Homo sapiens
  misc_feature (26)..(77): n includes a, c, g, or t, or contains no nucleotide
  misc_feature (80)..(81): n includes a, c, g, or t, or contains no nucleotide
  misc_feature (83)..(84): n includes a, c, g, or t, or contains no nucleotide
  misc_feature (86)..(87): n includes a, c, g, or t, or contains no nucleotide
  misc_feature (90)..(99): n includes a, c, g, or t, or contains no nucleotide
  misc_feature (101)..(101): n includes a, c, g, or t, or contains no nucleotide
  misc_feature (103)..(103): n includes a, c, g, or t, or contains no nucleotide
  misc_feature (105)..(110): n includes a, c, g, or t, or contains no nucleotide
  misc_feature (112)..(113): n includes a, c, g, or t, or contains no nucleotide
  misc_feature (116)..(116): n includes a, c, g, or t, or contains no nucleotide
  misc_feature (118)..(118): n includes a, c, g, or t, or contains no nucleotide
  misc_feature (128)..(143): n includes a, c, g, or t, or contains no nucleotide
  misc_feature (221)..(296): n includes a, c, g, or t, or contains no nucleotide
  misc_feature (523)..(538): n includes a, c, g, or t, or contains no nucleotide
aggccagatggatgctgttcgcatcnnnnnnnnnnnnnnnnnnnnnnnnnnnnnnnnnnnnnnnnnnnnnnnnnnnntgnngnncnncannnnnnnnnntntncnnnnnnanncananactcaagtcnnnnnnnnnnnnnnnnacaagccatgaagggtgtcaccaaggccatgggcaccatgaacagacagctgaagttgccccagatccagaagatcannnnnnnnnnnnnnnnnnnnnnnnnnnnnnnnnnnnnnnnnnnnnnnnnnnnnnnnnnnnnnnnnnnnnnnnnnnngggtgatgaggaagatgaagaggagagtgatgctgtggtgtcccaggttctggatgagctgggacttagcctaacagatgagctgtcgaacctcccctcaactgggggctcgcttagtgtggctgctggtgggaaaaaagcagaggccgcagcctcagccctagctgatgctgatgcagacctggaggaacggcttaagaacctgcggagggactgagtgcccctgnnnnnnnnnnnnnnnnagtggatgcccaggatcttttaccacaacccctctgtaataaaagagatttga

SEQ ID NO: 5130 - DNA, 476 bp, Homo sapiens
  misc_feature (37)..(41): n includes a, c, g, or t, or contains no nucleotide
  misc_feature (57)..(57): n includes a, c, g, or t, or contains no nucleotide
  misc_feature (80)..(95): n includes a, c, g, or t, or contains no nucleotide
  misc_feature (146)..(146): n includes a, c, g, or t, or contains no nucleotide
  misc_feature (160)..(160): n includes a, c, g, or t, or contains no nucleotide
  misc_feature (258)..(258): n includes a, c, g, or t, or contains no nucleotide
ggctcaggtccgaccctgctgcttggccacagcagtnnnnnggcaagtgggaaccantatctcttgggagcccccaaaannnnnnnnnnnnnnnnggaaccaggcctttcccgcttttgcctggctgcagggttcggctccgcccntgccccccagcccntcgtgtgtccacaccgcagtgcctctgcccctcgggggactggacacacatcctgccagaggcgctacgaagctttgcccagatgaagccaggtgggntccgcgttcactcccactctcccgaggggtgctggcctccccagggtttgccttcttacggatttagacgaggttcgaggctcacctatcagggcagctctcaggattgtcattttcctctttgcctgtgggtttaacttttgtatttttttaatcacaagtttgatacaaaatgtttttatcgtactctttggagatgcccattctacttttgaatt

SEQ ID NO: 5131 - DNA, 597 bp, Homo sapiens
  misc_feature (50)..(66): n includes a, c, g, or t, or contains no nucleotide
  misc_feature (403)..(458): n includes a, c, g, or t, or contains no nucleotide
ctccagcattgagcagaaaacagagaggaatgagaagaagcagcagatgnnnnnnnnnnnnnnnnngaagatagaggcagaactgcaggacatctgcaatgatgttctggagctgttggacaaatatcttattcccaatgctacacaaccagaaagtaaggtgttctacttgaaaatgaaaggagattattttaggtatctttctgaagtggcatctggagacaacaaacaaaccactgtgtcgaactcccagcaggcttaccaggaagcatttgaaattagtaagaaagaaatgcagcctacacacccaattcgtcttggtctggcactaaatttctcagtcttttactatgagattctaaactctcctgaaaaggcctgtagcctggcaaaaacggcattnnnnnnnnnnnnnnnnnnnnnnnnnnnnnnnnnnnnnnnnnnnnnnnnnnnnnnnnctctgatcatgcagttacttagggacaatctcactctgtggacatcggaaaaccagggagacgaaggagacgctggggagggagagaactaatgtttctcgtgctttgtgatctgtccagtgtcactctgtaccctcaa

SEQ ID NO: 5132 - DNA, 404 bp, Homo sapiens
  misc_feature (164)..(180): n includes a, c, g, or t, or contains no nucleotide
  misc_feature (208)..(208): n includes a, c, g, or t, or contains no nucleotide
  misc_feature (215)..(215): n includes a, c, g, or t, or contains no nucleotide
tactgtctcctcgtggggaccttccccttcaactcttttctctcgggcttcatctcttgtgtggggagtttcatcctagcggtttgcctgagaatacagatcaacccacagaacaaagcggatttccaaggcatctccccagagcgagcctttgctgattttcnnnnnnnnnnnnnnnnnctgcaccttgttgtcatgaactttgttnggctgantcattctcatttacttaattgaggagtaggagactaaaagaatgttcactctttgaatttcctggataagagttctggagatggcagcttattggacacatggattttcttcagatttgcacttactgctagctctgctttttatgcaggagaaaagcccagagttcactgtgtgtcagaacaactttc

SEQ ID NO: 5133 - DNA, 525 bp, Homo sapiens
  misc_feature (75)..(75): n includes a, c, g, or t, or contains no nucleotide
  misc_feature (226)..(242): n includes a, c, g, or t, or contains no nucleotide
  misc_feature (348)..(367): n includes a, c, g, or t, or contains no nucleotide
  misc_feature (427)..(499): n includes a, c, g, or t, or contains no nucleotide
gggcctatgtggtcactcccttccactgcaccgacctgggagtcaccatcctggtaaatagagggttcgttcccnaggaagaaagtgaatcctgaaacccggcagaaaggccagattgagggagaagtggacctcattgggatggtgaggctgacagaaaccaggcagccttttgtccctgagaacaatccagaaaggaaccactggcattatcgagacctggaannnnnnnnnnnnnnnnnaggcgcagagcccatcttcattgatgccaacttccagagcacagtccctggaggacccattggagggcaaaccagagttactctgaggaacgagcatctgcagtannnnnnnnnnnnnnnnnnnntctctgcagctacatcctacctgtggtttaagaaattcctacgtgggacacctggtgtgnnnnnnnnnnnnnnnnnnnnnnnnnnnnnnnnnnnnnnnnnnnnnnnnnnnnnnnnnnnnnnnnnnnnnnnnngctactggtataaagttctggccttc

SEQ ID NO: 5134 - DNA, 561 bp, Homo sapiens
  misc_feature (260)..(260): n includes a, c, g, or t, or contains no nucleotide
  misc_feature (265)..(265): n includes a, c, g, or t, or contains no nucleotide
  misc_feature (267)..(268): n includes a, c, g, or t, or contains no nucleotide
  misc_feature (303)..(318): n includes a, c, g, or t, or contains no nucleotide
  misc_feature (417)..(457): n includes a, c, g, or t, or contains no nucleotide
cgcagatcctccaaaggcacacgttgcccaccaccccatctctgaccatgaggccaccctgaggtgctgggccctgggcttctaccctgcggagatcacgctgacctggcagcgggatggggaggaacagacccaggacacagagcttgtggagaccaggcctgcaggggatggaaccttccagaagtgggccgctgtggtggtgccttctggagaggaacagagatacacatgccatgtgcagcacgaggggctgcccnagccncnnatcctgagatgggagcagtctccccagcccaccannnnnnnnnnnnnnnntcgttgctggccttgttgtccttggagctgtggtcactggagctgtggtcgctgctgtgatgtggaggaagaagagctcagatagaaacagagggagcnnnnnnnnnnnnnnnnnnnnnnnnnnnnnnnnnnnnnnnnnggtgtctctcacagctaataaagtgtgagacagcttccttgtgtgggactgagaagcaagatatcaatgtagcagaattgcacttgtgcctcacgaacatacat

SEQ ID NO: 5135 - DNA, 522 bp, Homo sapiens
  misc_feature (35)..(56): n includes a, c, g, or t, or contains no nucleotide
  misc_feature (432)..(456): n includes a, c, g, or t, or contains no nucleotide
  misc_feature (466)..(495): n includes a, c, g, or t, or contains no nucleotide
ctcttcccgagatggggccgccgagagaccccagnnnnnnnnnnnnnnnnnnnnnntgctgcgcttccagttccgaaaagcagatgtttaagcccttggactgagggtgggatcgcagctccgaagacggagaggagggaaatggggccctttcccctctattgcatccccctgcccgactccttccccgcacccacgtgccctagattcatggcagaaaatgaccaaatcctgtgtatttgttttatatatttaataactgttttaaatgaaagttttagtaaaaaaaatacaaaacaaaaagattaaattgctattgctgtagtaagagaagctctttgtatctgaacatagttgtatttgaaatttgtggttttttaatttatttaaaattggggggagggcatgggaaggatttaacaccgatatatnnnnnnnnnnnnnnnnnnnnnnnnngaaccttttnnnnnnnnnnnnnnnnnnnnnnnnnnnnnngtgggcgtttcttcttgtacttatgtg

SEQ ID NO: 5136 - DNA, 430 bp, Homo sapiens
  misc_feature (70)..(70): n includes a, c, g, or t, or contains no nucleotide
agcatctgtttgagggaaaggtctctgggcaagcaagtggttatttggattgcttgcttccctttttccnacctgggacattgtaatcataaaataacagtaaattccaaacctcaaaaactattatggcctgagcacagctgaaatctagcagagtttaactcttctgcctccatgtctgtcacttataattcaggttctgctgttggcttcagaacatgagcagaagaatcgttttatgctagttattgcattcatggttgaaactcaacttagggaaagggttccaatgtattaagcaatgggctgcttctccccaatcctccctaacaattcgttgtgtggacttctcatctaaaaggttagtggcttttgcttgggatcagtgctctctattgatgttcttgctggtctccagacacattcctgt

SEQ ID NO: 5137 - DNA, 496 bp, Homo sapiens
  misc_feature (195)..(195): n includes a, c, g, or t, or contains no nucleotide
  misc_feature (246)..(246): n includes a, c, g, or t, or contains no nucleotide
gtttggtaacttttatgccttcactttacaaattcaagccttagataaaagaaccgagcaattttctgctaaaaagtccttgatttagcactatttacatacaggccatactttacaaagtatttgctgaatggggaccttttgagttgaatttattttattatttttattttgtttaatgtctggtgctttctntcacctcttctaatcttttaatgtatttgtttgcaattttggggtaagacnttttttatgagtactttttctttgaagttttagcggtcaatttgcctttttaatgaacatgtgaagttatactgtggctatgcaacagctctcacctacgcgagtcttactttgagttagtgccataacagaccactgtatgtttacttctcaccatttgagttgcccatcttgtttcacactagtcacattcttgttttaagtgcctttagttttaacagttcactttttacagtgctatttactgaag

SEQ ID NO: 5138 - DNA, 425 bp, Homo sapiens
tcacgaaccgaaaaaccaaagctatatggtaagaggctgtgcaaccgcctcaatgtgccaacatgcccacctgggtgacgccttcagcatgaaccacattgatgtctcctgctgtactaaaagtggctgtaaccacccagacctggatgtccagtaccgcagtggggctgctcctcagcctggccctgcccatctcagcctcaccatcaccctgctaatgactgccagactgtggggaggcactctcctctggacctaaacctgaaatccccctctctgccctggctggatccgggggacccctttgcccttccctcggctcccagccctacagacttgctgtgtgacctcaggccagtgtgccgacctctctgggcctcagttttcccagctatgaaaacagctatctcacaaagttgtgtgaa

SEQ ID NO: 5139 - DNA, 389 bp, Homo sapiens
  misc_feature (47)..(47): n includes a, c, g, or t, or contains no nucleotide
  misc_feature (225)..(251): n includes a, c, g, or t, or contains no nucleotide
  misc_feature (332)..(332): n includes a, c, g, or t, or contains no nucleotide
acttcttctgcatgatgtgtggtagactccctttgctggcttgtgcnagtgatactgagaaaatacatgaacagaaactgcccaggtggaacagcacgtaacctagtgagtgactgtactcctttctaggaatgctgattcagagtgcacctctttgactaggtcccaggatccccttgtccctggagtagggactaactatagcacaaagtaatatgtgccaannnnnnnnnnnnnnnnnnnnnnnnnnntaaacgactaaaggatttgttgggtttttgcttaagttttgaaccaaatcctagagccagctgataatatttaataatctngaggagagaataatgatgtaccaataagtggagattcctccttatgatgtatgctag

SEQ ID NO: 5140 - DNA, 402 bp, Homo sapiens
gtaatcatgcctcctattactgaagtcagattggaaccactaaagatccaaactttctgtctggtaatagaaagtaaaaatctagacatcatttacatttgagaaagctgtttttaacattattttaaaatgccaaatatgttctttctagaaaaatatttatttttgtttttgttggatagcttttaattacatttcagagaggtgtaattttgggtagatgctcattacatttttgaaaggtttatgattccaaaataaagatttatatgactggtgatactggctttacagaaatttcagagaactaatttttaaaatctttagcatttaaaactttttttgttttgttttctgacatattctgacaaagagcagcaaaccactgctgtgtggcattct

SEQ ID NO: 5141 - DNA, 531 bp, Homo sapiens
  misc_feature (78)..(109): n includes a, c, g, or t, or contains no nucleotide
  misc_feature (187)..(213): n includes a, c, g, or t, or contains no nucleotide
  misc_feature (381)..(395): n includes a, c, g, or t, or contains no nucleotide
catcgccagcatctttgcctggacacgtggcctggagcaccgggggaagctggatgggaaccaagacctcatcaggtnnnnnnnnnnnnnnnnnnnnnnnnnnnnnnnnacggtggagagtggagccatgaccaaggacctggcgggctgcattcacggcctcagcaatgtgaagctgaacgagcannnnnnnnnnnnnnnnnnnnnnnnnnncaccatcaagagcaacctggacagagccctgggcaggcagtagggggaggcgccacccatggctgcagtggaggggccagggctgagccggcgggtcctcctgagcgcggcagagggtgagcctcacagcccctctctggaggcctttctaggggatgtttttttatnnnnnnnnnnnnnnnaaaagcatatgtgtgtttcccctcatggtgacgtgaggcaggagcagtgcgttttacctcagccagtcagtatgttttgcatactgtaatttatattgcccttggaacacatggtgccatatttagctactaaaaa

SEQ ID NO: 5142 - DNA, 443 bp, Homo sapiens
  misc_feature (206)..(206): n includes a, c, g, or t, or contains no nucleotide
  misc_feature (346)..(346): n includes a, c, g, or t, or contains no nucleotide
  misc_feature (349)..(349): n includes a, c, g, or t, or contains no nucleotide
gaccttggtatacacatcacctgttctttcccttttcttgaaatgtggtgtttgctgtaaattggattgaattatttttctcagagccttgcatgtcagtaaacaggaaggaaggaggccatctgttcaaaaattgtgacattgggcatgaggctggacgacttgttaatgtagttgtttctatagcccctatgattagacacttnagtgtcagggcacagattatctaaaattagccagctcttcctgtcagggatcagggcagcactaacaggcgcaaaagtagagctgtcaagatgggctagttttccttgggttctgaagaaaatggatgtgcaaaggcttnggntccgctacttgtaacaagctccagcccttaaaatgaaattaacttcctactcaggcaccctgcttaggtgcacagctgttcaatatacacagag

SEQ ID NO: 5143 - DNA, 579 bp, Homo sapiens
  misc_feature (163)..(163): n includes a, c, g, or t, or contains no nucleotide
  misc_feature (274)..(275): n includes a, c, g, or t, or contains no nucleotide
  misc_feature (277)..(277): n includes a, c, g, or t, or contains no nucleotide
  misc_feature (279)..(282): n includes a, c, g, or t, or contains no nucleotide
  misc_feature (285)..(290): n includes a, c, g, or t, or contains no nucleotide
  misc_feature (293)..(297): n includes a, c, g, or t, or contains no nucleotide
  misc_feature (306)..(309): n includes a, c, g, or t, or contains no nucleotide
  misc_feature (383)..(383): n includes a, c, g, or t, or contains no nucleotide
ctgacttggggcagcttgggtcttcttgggcacctctctgggaaaacccagggtgaggttcagcctgtgagggctgggatgggtttcgtgggcccaagggcagacctttctttgggactgtgtggaccaaggagcttccatctagtgacaagtgacccccagntatcgcctcttgccttcccctgtggccactttccagggtggactctgtcttgttcactgcagtatcccaactgcaggtccagtgcaggcaataaatatgtgatggacaaannanannnnaannnnnnaannnnncaaggctgnnnncttcaggcagccttcccggaattctccatccctcagtgcaggatgggggctggtcctcagctgtctgccctcancccctggccccccaggaagcctctttcatgggctgttaggttgacttcagttttgcctcttggacaacagggggtcttgtacatccttgggtgaccaggaaaagttcaggctatggggggccaaagggagggctgccccttccccaccagtgaccactttattccacttcctccattacccagttttggcccacag

SEQ ID NO: 5144 - DNA, 441 bp, Homo sapiens
  misc_feature (26)..(26): n includes a, c, g, or t, or contains no nucleotide
  misc_feature (33)..(33): n includes a, c, g, or t, or contains no nucleotide
  misc_feature (37)..(37): n includes a, c, g, or t, or contains no nucleotide
ctagagctgcaggtaccagccactcngccccangggnttatggccacagagggataggcacagtctccaccaccctggagccaagggtctttcacatcacctatccctacatacataccaaatggaaaagtggccatccttttccccccaaacacacccccttaacctatctcttgggacttagcccgaccctccctctcatttcccattaagtctgagaggcaagagctaggttaggcaaggaggtggttggccagagatggggaacagccaggtgccccagtcctctgatttttcctccatcctgcttaccacctccctgggtacttacagccttctcttgggaacagccggggccaggactgggtcacctatgagctgaatcagcatctcctcctgagtcccagggcccctgcagttcccagtctcttctgtcctgca

SEQ ID NO: 5145 - DNA, 288 bp, Homo sapiens
  misc_feature (148)..(164): n includes a, c, g, or t, or contains no nucleotide
taccacaagtactccctgataaaggggaatttccatgccgtctacagggatgacctgaagaaattgctagagaccgagtgtcctcagtatatcaggaaaaagggtgcagacgtctggttcaaagagttggatatcaacactgatggtnnnnnnnnnnnnnnnnngttcctcattctggtgataaagatgggcgtggcagcccacaaaaaaagccatgaagaaagccacaaagagtagctgagttactgggcccagaggctgggcccctggacatgtacctgcagaata

SEQ ID NO: 5146 - DNA, 494 bp, Homo sapiens
  misc_feature (27)..(27): n includes a, c, g, or t, or contains no nucleotide
  misc_feature (34)..(34): n includes a, c, g, or t, or contains no nucleotide
  misc_feature (49)..(49): n includes a, c, g, or t, or contains no nucleotide
  misc_feature (56)..(56): n includes a, c, g, or t, or contains no nucleotide
  misc_feature (61)..(61): n includes a, c, g, or t, or contains no nucleotide
  misc_feature (102)..(103): n includes a, c, g, or t, or contains no nucleotide
  misc_feature (139)..(155): n includes a, c, g, or t, or contains no nucleotide
  misc_feature (167)..(167): n includes a, c, g, or t, or contains no nucleotide
  misc_feature (174)..(174): n includes a, c, g, or t, or contains no nucleotide
  misc_feature (181)..(181): n includes a, c, g, or t, or contains no nucleotide
  misc_feature (195)..(195): n includes a, c, g, or t, or contains no nucleotide
  misc_feature (202)..(202): n includes a, c, g, or t, or contains no nucleotide
  misc_feature (248)..(249): n includes a, c, g, or t, or contains no nucleotide
  misc_feature (345)..(345): n includes a, c, g, or t, or contains no nucleotide
ctctgtcagagtgaacagcaccgcgangacaggncaggctcgtggctcnggaagancaaanccccacacacactcaaggggtcgaaaacaaaccccacacgnngggctctcacctccttctcctaggtagtatttattnnnnnnnnnnnnnnnnngcagtttttaancctctancctattngcactgttgtgacncgttggnccattatttgatttttgtacgaaaaaaagctttgttatagaaatcnnagcatactatttttttaaatctggagagaagatattctggtgactgaaagtatggtcgggtgtcagatataaatgtgcaaatgccttcttgctgtnctgtcggtctcagtacgttcactttatagctgctggcaatatcgaaggttccttttttgtttgtgtaaactctaatttctatcaaggtgtcatggatttttaaaattagtatttcattacaaatgtctcagcattggttaactaatttt

SEQ ID NO: 5147 - DNA, 99 bp, Homo sapiens
aaacggagacgcaggagaagaacaccctgccgaccaaagagaccattgagcaggagaagcggagtgaaatttcctaagatcctggaggatttcctaccc

SEQ ID NO: 5148 - DNA, 517 bp, Homo sapiens
  misc_feature (98)..(98): n includes a, c, g, or t, or contains no nucleotide
  misc_feature (123)..(123): n includes a, c, g, or t, or contains no nucleotide
  misc_feature (163)..(163): n includes a, c, g, or t, or contains no nucleotide
  misc_feature (188)..(188): n includes a, c, g, or t, or contains no nucleotide
  misc_feature (202)..(202): n includes a, c, g, or t, or contains no nucleotide
  misc_feature (207)..(207): n includes a, c, g, or t, or contains no nucleotide
  misc_feature (235)..(235): n includes a, c, g, or t, or contains no nucleotide
  misc_feature (247)..(275): n includes a, c, g, or t, or contains no nucleotide
  misc_feature (278)..(278): n includes a, c, g, or t, or contains no nucleotide
  misc_feature (321)..(321): n includes a, c, g, or t, or contains no nucleotide
  misc_feature (350)..(350): n includes a, c, g, or t, or contains no nucleotide
gagctcaggacttgggctgtttgtagttttttgccttttagacaagaaaaaaaaatctttccactctttagtttttgattctgatgactcgtttttcnttctactctgtggccccaatttttnataaagtgtttttgagtgtcctatgggccggggcagggtnccaagatcttttcccttccccaggncccctcggctcccntcccnagatcccacccccagccccactggttgnccaaacactaannnnnnnnnnnnnnnnnnnnnnnnnnnnnccncacctcctgccatggccatgaaccgcgacccccactaaatttnctagattggggatagggagaaagggaggncccaggaaggtctcccctgattttttttcatagtaatttttttccccagagtttgaattttttggtcttctcctggttttttggcaaattaggggggcccggggctcaagtgcgggaagggggctggcccgaggatcccatggctctcacaccatgtttttgtacag

SEQ ID NO: 5149 - DNA, 414 bp, Homo sapiens
  misc_feature (121)..(121): n includes a, c, g, or t, or contains no nucleotide
  misc_feature (378)..(378): n includes a, c, g, or t, or contains no nucleotide
  misc_feature (387)..(387): n includes a, c, g, or t, or contains no nucleotide
cgcttcacccagtggtactttggtgcctactccattgtggcgggcgtgtttgtgtgcctgctggagtacccccgggggaagaggaagaagggctccaccatggagcgctggggacagaagnacatgaccgccgtggtgaagctgttcgggccctttaccaggaattactatgttcgggccgtcctgcatctcctgctctcggtgcccgccggcttcctgctggccaccatccttgggaccgcctgcctggccattgcgagcggcatctacctactggcggctgtgcgtggcgagcagtggacgcccatcgagcccaagccccgggagcggccgcagatcggaggcaccatcaagcagccgcccagcaaccccccgccncggcccccngccgaggcccgcaagaagcccagcgag

SEQ ID NO: 5150 - DNA, 340 bp, Homo sapiens
  misc_feature (34)..(34): n includes a, c, g, or t, or contains no nucleotide
  misc_feature (40)..(40): n includes a, c, g, or t, or contains no nucleotide
  misc_feature (52)..(52): n includes a, c, g, or t, or contains no nucleotide
  misc_feature (79)..(79): n includes a, c, g, or t, or contains no nucleotide
  misc_feature (106)..(106): n includes a, c, g, or t, or contains no nucleotide
  misc_feature (113)..(113): n includes a, c, g, or t, or contains no nucleotide
  misc_feature (146)..(146): n includes a, c, g, or t, or contains no nucleotide
atgatccagaactatgtgctgtgacgttcgtggnacaggnccagttattggnctcatctgtgacctacgatcatccctnccaaacctgttgaaaaaagactcatgncccccancccccgcaaaaaaacaaagattcatggctgganccatgtatgatgatgaaagcctgtgtctttgagggattctaccctgaacatacctcacagatcctccctgtcatgccacatttcactgattggaatgtggaaatggaaaaggaatttaggatgtgcattttcacctgaggtttccctgcatccctgcagtgccaaagccccaccttcagggaccacctggaatg

SEQ ID NO: 5151 - DNA, 511 bp, Homo sapiens
  misc_feature (71)..(71): n includes a, c, g, or t, or contains no nucleotide
  misc_feature (83)..(83): n includes a, c, g, or t, or contains no nucleotide
  misc_feature (92)..(93): n includes a, c, g, or t, or contains no nucleotide
  misc_feature (103)..(103): n includes a, c, g, or t, or contains no nucleotide
  misc_feature (105)..(106): n includes a, c, g, or t, or contains no nucleotide
  misc_feature (108)..(109): n includes a, c, g, or t, or contains no nucleotide
  misc_feature (112)..(115): n includes a, c, g, or t, or contains no nucleotide
  misc_feature (118)..(129): n includes a, c, g, or t, or contains no nucleotide
  misc_feature (131)..(169): n includes a, c, g, or t, or contains no nucleotide
  misc_feature (172)..(173): n includes a, c, g, or t, or contains no nucleotide
  misc_feature (176)..(178): n includes a, c, g, or t, or contains no nucleotide
  misc_feature (180)..(180): n includes a, c, g, or t, or contains no nucleotide
  misc_feature (186)..(186): n includes a, c, g, or t, or contains no nucleotide
  misc_feature (192)..(192): n includes a, c, g, or t, or contains no nucleotide
  misc_feature (203)..(203): n includes a, c, g, or t, or contains no nucleotide
  misc_feature (208)..(208): n includes a, c, g, or t, or contains no nucleotide
  misc_feature (216)..(216): n includes a, c, g, or t, or contains no nucleotide
  misc_feature (220)..(220): n includes a, c, g, or t, or contains no nucleotide
  misc_feature (227)..(227): n includes a, c, g, or t, or contains no nucleotide
  misc_feature (239)..(239): n includes a, c, g, or t, or contains no nucleotide
  misc_feature (266)..(266): n includes a, c, g, or t, or contains no nucleotide
  misc_feature (287)..(287): n includes a, c, g, or t, or contains no nucleotide
  misc_feature (298)..(298): n includes a, c, g, or t, or contains no nucleotide
  misc_feature (343)..(343): n includes a, c, g, or t, or contains no nucleotide
  misc_feature (425)..(469): n includes a, c, g, or t, or contains no nucleotide
aacagctttctttcccagcacgagcctttatagctctctttagctcaaccactctgtccatccagccaatnggatgtcccttncccctgtannccccaatttncnngnnttnnnnttnnnnnnnnnnnntnnnnnnnnnnnnnnnnnnnnnnnnnnnnnnnnnnnnnnnttnnttnnnanggtatnggagcnagtgcaacttnaaacntcaagttngcancttacanttttgaattttnaaaatgatggttttatctgttgtgtgnaagtggttcacccttgagganccaggagcctnccatatcctgactgaaaaccttttctgagacttagagtaacagtncttttggttccttgagttctcctgtctccagataccaaatgaccttgacttttctgccttgtgaattcgtagtccaatcagnnnnnnnnnnnnnnnnnnnnnnnnnnnnnnnnnnnnnnnnnnnnnaacacagtgccagtgcagaagtttctccaggtggcctccctt

SEQ ID NO: 5152 - DNA, 128 bp, Homo sapiens
gtggctgttaattcttcagtcatggcattcgcagtgcccagtgatggcattactctgcactatagccatttgccccaacttaagtttagaaattacaagtttcagtaatagctgaacctgttcaaaat

SEQ ID NO: 5153 - DNA, 167 bp, Homo sapiens
atggtgaacttacttcagattgtgcgggaccactgggttcatgttcttgtccctatgggatttgtcattggatgttatttagacagaaagagtgatgaacggctaactgccttccggaacaagagtatgttatttaaaagggaattgcaacccagtgaagaagttac

SEQ ID NO: 5154 - DNA, 124 bp, Homo sapiens
tactttcattgtaaataagcctgtcttcctatctggattttttgtgtgcatacatattctactgattaactacttttgcagttttaatcctgtattatttcttctactttgttttgtgtaaaag

SEQ ID NO: 5155 - DNA, 192 bp, Homo sapiens
tcttaatagcttctagtgctgctacaatctaagtcaggtcaccagagggaagagaacatggcattaaaagaatcacatcttcagaagagaagacactaatattattacccatatacatgatttcagaagatgacataagattcctcttaaagaggaaatgtcaggaatcaagccactgaatccttaaagaga

SEQ ID NO: 5156 - DNA, 549 bp, Homo sapiens
  misc_feature (108)..(134): n includes a, c, g, or t, or contains no nucleotide
  misc_feature (336)..(362): n includes a, c, g, or t, or contains no nucleotide
cagaggttgatctttgctgggaaacagctggaagatggacgcaccctgtctgactacaacatccagaaagagtccaccctgcacctggtgctccgtcttagaggtggnnnnnnnnnnnnnnnnnnnnnnnnnnntggtaagaccatcactctcgaagtggagccgagtgacaccattgagaatgtcaaggcaaagatccaagacaaggaaggcatccctcctgaccagcagaggttgatctttgctgggaaacagctggaagatggacgcaccctgtctgactacaacatccagaaagagtccaccctgcacctggtgctccgtctcagaggtggnnnnnnnnnnnnnnnnnnnnnnnnnnntggtaagaccatcaccctcgaggtggagcccagtgacaccatcgagaatgtcaaggcaaagatccaagataaggaaggcatccctcctgatcagcagaggttgatctttgctgggaaacagctggaagatggacgcaccctgtctgactacaacatccagaaagagtccactctgcacttggtcctg

SEQ ID NO: 5157 - DNA, 509 bp, Homo sapiens
  misc_feature (30)..(30): n includes a, c, g, or t, or contains no nucleotide
  misc_feature (50)..(81): n includes a, c, g, or t, or contains no nucleotide
  misc_feature (181)..(181): n includes a, c, g, or t, or contains no nucleotide
  misc_feature (198)..(199): n includes a, c, g, or t, or contains no nucleotide
  misc_feature (201)..(215): n includes a, c, g, or t, or contains no nucleotide
  misc_feature (233)..(233): n includes a, c, g, or t, or contains no nucleotide
  misc_feature (358)..(359): n includes a, c, g, or t, or contains no nucleotide
cttctgctgctgaggccgggattgctacgnctgggactgaagactcagannnnnnnnnnnnnnnnnnnnnnnnnnnnnnnnaagagtttggccgcactgggcttcctgacctaagcagtatgactgaggaagagcagattgcttatgccatgcagatgtccctgcagggagcagagtttgngccaggcggaatcagcnnannnnnnnnnnnnnnntcagctatggacacatcngagccagccaaggaggaggatgattacgacgtgatgcaggaccccgagttccttcagagtgtcctagagaacctcccaggtgtggatcccaacaatgaagccattcgaaatgctatgggctcccnngcctcccaggccaccaaggacggcaagaaggacaagaaggaggaagacaagaagtgagactggagggaaagggtagctgagtctgcttaggggactgcatgggaagcacggaatatagggttagatgtgtgttatctgtaaccattacag

SEQ ID NO: 5158 - DNA, 407 bp, Homo sapiens
  misc_feature (72)..(72): n includes a, c, g, or t, or contains no nucleotide
  misc_feature (78)..(78): n includes a, c, g, or t, or contains no nucleotide
  misc_feature (131)..(131): n includes a, c, g, or t, or contains no nucleotide
  misc_feature (133)..(134): n includes a, c, g, or t, or contains no nucleotide
  misc_feature (184)..(184): n includes a, c, g, or t, or contains no nucleotide
  misc_feature (188)..(209): n includes a, c, g, or t, or contains no nucleotide
tgagactcccctaaaggccagaaaggtgcgcttctccgagaaggtcactgtccatttcctggctgtctgggncagggncggcccaggccgcccgccagggcccctgggagcagcttgctcgggatcgcagncnnttcgcacgccgcatcacccaggcccaggaggagctgagcccctgcctcancccnnnnnnnnnnnnnnnnnnnnnnggcacgcctcaggaacccacctttagcccccatccctgccctcacccagaccttgccttcctcctctgtcccttcgtccccagtccagaccacgcccttgagccaagctgtggccacaccttcccgctcgtctgctgctgcagcggctgccctggacctcagtgggaggcgtggctgagaccaactggtttgcctata

SEQ ID NO: 5159 - DNA, 403 bp, Homo sapiens
acctgacattgctacgtttctaccagtgtttcaatttaaagtgctagtgtttaaaaacattttcaagggataaggccttctgtactttgcttatttgaagaatcagtggtaggagcagtgaagtaaattctatggagtacatttctaaaataccacatttctgaaatcataaataagtttattcaggttctaaccctttgctgtacacaagcagacagaaatgcatctgttacataaatgagaaaaagctattatgctgatggagcatgctttttaaatcctttaaaaacactcaccatataaacttgcatttgagcttgtgtgttcttttgttaatgtgtagagttctcctttctcgaaattgccagtgtgtacttggcttaactcaagaacagtttcttct

SEQ ID NO: 5160 - DNA, 239 bp, Homo sapiens
  misc_feature (157)..(157): n includes a, c, g, or t, or contains no nucleotide
  misc_feature (164)..(165): n includes a, c, g, or t, or contains no nucleotide
  misc_feature (204)..(204): n includes a, c, g, or t, or contains no nucleotide
gtgtgcttgctagctgggcaagaaagcagcagtggacctgccccaaggccacacgtgcctggtcaggctggcttctgatgttcagtcccctgggccgggacagattttttttaacgtcttgaaacttaaactctgtgcttgtaggatactgtaaccnttttgtnntttttttttttttttttttttaaacctccacctccagtnggctgtgactggtcccagtgattatacgttattgg

SEQ ID NO: 5161 - DNA, 444 bp, Homo sapiens
  misc_feature (104)..(104): n includes a, c, g, or t, or contains no nucleotide
  misc_feature (139)..(139): n includes a, c, g, or t, or contains no nucleotide
  misc_feature (174)..(176): n includes a, c, g, or t, or contains no nucleotide
  misc_feature (178)..(203): n includes a, c, g, or t, or contains no nucleotide
  misc_feature (228)..(228): n includes a, c, g, or t, or contains no nucleotide
  misc_feature (340)..(354): n includes a, c, g, or t, or contains no nucleotide
actggtataacatgccttcagtatactaacactcatatgctcagttttgttttgttttggcagttgacaagaagttaatttgctttagtaaaaatccctcattnccagcctttctatataaatagctctttcttgctgnttttaatgtggtgcacactatagcctcacaaaccnnntnnnnnnnnnnnnnnnnnnnnnnnnnnaactaaagttactggcttggtcttnatttgcacagtttttgcgtcttgtttgcttcttgcatctgattaactagaatatttctctttcccccttttaatttgtgatgtcacttgaccccatttatgtgtaggagcannnnnnnnnnnnnnnccaatactgcacacataagatacatacttgtgtgcagaaagtatcttcctccaggcttgtaatacccttcacatggaagattaatgaggg

SEQ ID NO: 5162 - DNA, 496 bp, Homo sapiens
  misc_feature (79)..(110): n includes a, c, g, or t, or contains no nucleotide
  misc_feature (112)..(112): n includes a, c, g, or t, or contains no nucleotide
  misc_feature (123)..(123): n includes a, c, g, or t, or contains no nucleotide
  misc_feature (134)..(136): n includes a, c, g, or t, or contains no nucleotide
  misc_feature (147)..(147): n includes a, c, g, or t, or contains no nucleotide
  misc_feature (172)..(172): n includes a, c, g, or t, or contains no nucleotide
  misc_feature (177)..(177): n includes a, c, g, or t, or contains no nucleotide
  misc_feature (181)..(203): n includes a, c, g, or t, or contains no nucleotide
  misc_feature (206)..(207): n includes a, c, g, or t, or contains no nucleotide
  misc_feature (275)..(275): n includes a, c, g, or t, or contains no nucleotide
  misc_feature (304)..(304): n includes a, c, g, or t, or contains no nucleotide
aggcgctcacctctgaggacctgctctacctggaattcctgcagaagtttgagaagaacttcatcaatcagggcccctnnnnnnnnnnnnnnnnnnnnnnnnnnnnnnnncngggctggaagntgctgcgcatnnnttccccaaggnagatgctgaagcgcattccgcaggnccgtngatnnnnnnnnnnnnnnnnnnnnnnnggnngctgcaggacctcgcgcctgacactgcgctctagccccgcgcgccgtggcaccccaacaccggcaggnaacctaccctcggctcccgggtctccccntccctcgccacccctaaccagcggctttcgcgccgccctccgccctccgtggctccgaggtggtggggggcgccgcagtcatccctttcctcgctcgattccttttcccgcgctccatgcctccccctcagctcccggtgctgcggaagaactgaaggttcatgcctactctgacgggagcatctgtatttt

SEQ ID NO: 5163 - DNA, 352 bp, Homo sapiens
cccctaacaacagtgagagagcaatgcgagcagttggagaaatgtgtaaaggcccgggagcggctagagctctgtgatgagcgtgtatcctctcgatcacatacagaagaggattgcacggaggagctctttgacttcttgcatgcgagggaccattgcgtggcccacaaactctttaacaacttgaaataaatgtgtggacttaattcaccccagtcttcatcatctgggcatcagaatatttccttatggttttggatgtaccatttgtttcttatttgtgtaactgtaagttcacatgaacctcatgggtttggcttaggctggtagcttctatgtaattcgcaatgat

SEQ ID NO: 5164 - DNA, 574 bp, Homo sapiens
  misc_feature (113)..(113): n includes a, c, g, or t, or contains no nucleotide
  misc_feature (138)..(138): n includes a, c, g, or t, or contains no nucleotide
  misc_feature (178)..(178): n includes a, c, g, or t, or contains no nucleotide
  misc_feature (203)..(203): n includes a, c, g, or t, or contains no nucleotide
  misc_feature (217)..(217): n includes a, c, g, or t, or contains no nucleotide
  misc_feature (222)..(222): n includes a, c, g, or t, or contains no nucleotide
  misc_feature (250)..(250): n includes a, c, g, or t, or contains no nucleotide
  misc_feature (262)..(290): n includes a, c, g, or t, or contains no nucleotide
  misc_feature (293)..(293): n includes a, c, g, or t, or contains no nucleotide
  misc_feature (336)..(336): n includes a, c, g, or t, or contains no nucleotide
  misc_feature (365)..(365): n includes a, c, g, or t, or contains no nucleotide
  misc_feature (534)..(549): n includes a, c, g, or t, or contains no nucleotide
gatccaggtcttggggagctcaggacttgggctgtttgtagttttttgccttttagacaagaaaaaaaaatctttccactctttagtttttgattctgatgactcgtttttcnttctactctgtggccccaatttttnataaagtgtttttgagtgtcctatgggccggggcagggtnccaagatcttttcccttccccaggncccctcggctcccntcccnagatcccacccccagccccactggttgnccaaacactaannnnnnnnnnnnnnnnnnnnnnnnnnnnnccncacctcctgccatggccatgaaccgcgacccccactaaatttnctagattggggatagggagaaagggaggncccaggaaggtctcccctgattttttttcatagtaatttttttccccagagtttgaattttttggtcttctcctggttttttggcaaattaggggggcccggggctcaagtgcgggaagggggctggcccgaggatcccatggctctcacaccatgtttttgtacagannnnnnnnnnnnnnnnttgttctcttgaaataaacagaaga

SEQ ID NO: 5165 - DNA, 582 bp, Homo sapiens
  misc_feature (246)..(272): n includes a, c, g, or t, or contains no nucleotide
  misc_feature (325)..(344): n includes a, c, g, or t, or contains no nucleotide
  misc_feature (484)..(499): n includes a, c, g, or t, or contains no nucleotide
cactgttgtttcacaagatgatgtttgaaactattccaatgttcagtggcggaacttgcaatcctcagtttgtggtctgccagctaaaggtgaagatctattcctccaattcaggacccacacgatgggaggacaagttcatgtattttgagttccctcagccgttacctgtgtgtggtgatatcaaagtagagttcttccacaaacagaacaagatgctaaaaaaggacaaaatgtttcactttnnnnnnnnnnnnnnnnnnnnnnnnnnnccagaggaaacctcagaaaaagtagaaaatggaagtctatgtgatcaagaaannnnnnnnnnnnnnnnnnnngagcgtgcagataatgacaaggagtatctagtacttactttaacaaaaaatgatcttgacaaagcaaataaagacaaagccaaccgatacttttctccaaatgttaaggtgaagctgtacttcacaaaaacagtagaggnnnnnnnnnnnnnnnnggctagcagttcaacttctgtaacaccagatgttagtgacaatgaacctgatcattatagatattctgacaccactgactctg

SEQ ID NO: 5166 - DNA, 50 bp, Homo sapiens
aataccagcgtcgtctggttttggctgcacaaaggcgaggcccagcgatg

SEQ ID NO: 5167 - DNA, 594 bp, Homo sapiens
  misc_feature (26)..(26): n includes a, c, g, or t, or contains no nucleotide
  misc_feature (41)..(58): n includes a, c, g, or t, or contains no nucleotide
  misc_feature (86)..(86): n includes a, c, g, or t, or contains no nucleotide
  misc_feature (129)..(129): n includes a, c, g, or t, or contains no nucleotide
  misc_feature (145)..(145): n includes a, c, g, or t, or contains no nucleotide
  misc_feature (199)..(199): n includes a, c, g, or t, or contains no nucleotide
  misc_feature (210)..(210): n includes a, c, g, or t, or contains no nucleotide
  misc_feature (213)..(213): n includes a, c, g, or t, or contains no nucleotide
  misc_feature (222)..(222): n includes a, c, g, or t, or contains no nucleotide
  misc_feature (234)..(234): n includes a, c, g, or t, or contains no nucleotide
  misc_feature (245)..(245): n includes a, c, g, or t, or contains no nucleotide
  misc_feature (266)..(266): n includes a, c, g, or t, or contains no nucleotide
  misc_feature (273)..(273): n includes a, c, g, or t, or contains no nucleotide
  misc_feature (284)..(285): n includes a, c, g, or t, or contains no nucleotide
  misc_feature (290)..(290): n includes a, c, g, or t, or contains no nucleotide
  misc_feature (298)..(298): n includes a, c, g, or t, or contains no nucleotide
  misc_feature (305)..(305): n includes a, c, g, or t, or contains no nucleotide
  misc_feature (311)..(311): n includes a, c, g, or t, or contains no nucleotide
  misc_feature (316)..(316): n includes a, c, g, or t, or contains no nucleotide
  misc_feature (324)..(325): n includes a, c, g, or t, or contains no nucleotide
  misc_feature (329)..(348): n includes a, c, g, or t, or contains no nucleotide
  misc_feature (367)..(494): n includes a, c, g, or t, or contains no nucleotide
  misc_feature (510)..(510): n includes a, c, g, or t, or contains no nucleotide
cttctctcctgtcaacagtggccagnccccccaactatgannnnnnnnnnnnnnnnnncacgaggtggctgtgctgggggcgcccncacaaccctgctcccccgacgtccaccgtgatccacatccgcnagcgagacctccgtgncccgaccatgtcgtctggtccctgttcaacaccctcttcatgaacccctgctgncctgggcttcnatnagcattcgncctactccgtgnaagtctagggnacaggaagatggttggcgacngtgaccnggggcccaggnncctantgcctccnaccgccnaagtgncctgnaacatctnngggnnnnnnnnnnnnnnnnnnnntcctcatgaccattccatnnnnnnnnnnnnnnnnnnnnnnnnnnnnnnnnnnnnnnnnnnnnnnnnnnnnnnnnnnnnnnnnnnnnnnnnnnnnnnnnnnnnnnnnnnnnnnnnnnnnnnnnnnnnnnnnnnnnnnnnnnnnnnnnccattcctcgccctgncccccggagccgagtcctgtatcagccctttatcctcacacgcttttctacaatggcattcaataaagtgcacgtgtttctggt

SEQ ID NO: 5168 - DNA, 330 bp, Homo sapiens
  misc_feature (118)..(140): n includes a, c, g, or t, or contains no nucleotide
  misc_feature (143)..(143): n includes a, c, g, or t, or contains no nucleotide
  misc_feature (276)..(276): n includes a, c, g, or t, or contains no nucleotide
  misc_feature (291)..(291): n includes a, c, g, or t, or contains no nucleotide
aatgtcaggctttcctcggagacgggtggcatggggagcagctagaacaatgcagattcatccataatccctttctgctgttcaccaccacccatgatccatctgtgtagtttctgannnnnnnnnnnnnnnnnnnnnnnaantagtttgtaaattttcagtttctacacactttatcatccactcgtgattttttaattaaagcgttttaattcctttctctgttcagctgttgatgctgagatccatatttagttttataagcttctccctggnttttttttttttttnggttttttttttttggctcatgaatttttctgtttgtca

SEQ ID NO: 5169 - DNA, 428 bp, Homo sapiens
  misc_feature (268)..(273): n includes a, c, g, or t, or contains no nucleotide
  misc_feature (282)..(282): n includes a, c, g, or t, or contains no nucleotide
  misc_feature (284)..(284): n includes a, c, g, or t, or contains no nucleotide
gattaactatttgcaccgaaatgtcttgttttgttgcgacataggaaaataaccaagcacaaagttatattccatcctttttactgatttttttttcttctatctgttccatctgctgtattcatttctccaatctcatgtccattttggtgtgggagtcggggtagggggtactcttgtcaaaaggcacattggtgcatgtgtgtttgctagctcacttgtccatgaaaatattttatgatattaaagaaaatcttttgaaatggcnnnnnnttaaggaananaatttatgtggcttctcatttttaaatcccctcagaggtgtgactagtctctttatcagcacacacttaaaaaatttttaatattgtctattaaaaataggacaaacttggagagtatggacaactttgatattgcttggcaca

SEQ ID NO: 5170 - DNA, 444 bp, Homo sapiens
  misc_feature (196)..(196): n includes a, c, g, or t, or contains no nucleotide
  misc_feature (199)..(201): n includes a, c, g, or t, or contains no nucleotide
  misc_feature (204)..(210): n includes a, c, g, or t, or contains no nucleotide
  misc_feature (347)..(352): n includes a, c, g, or t, or contains no nucleotide
  misc_feature (354)..(359): n includes a, c, g, or t, or contains no nucleotide
  misc_feature (361)..(363): n includes a, c, g, or t, or contains no nucleotide
gacattcaactgtagtatccatatgttgcttaaatttccttatgagccccatgatggaaagacttaaagatgaatttgagaaaaattgaaagaaattagattatcaggttctgttaaattgttacatgtatcttgcttaaatttctgtttattaatttatatccacccaagtacataaagcaaatttggaggaaanaannnaannnnnnnaatattttctgataattgctttttttattcttgtgttttctacttaaacataatgtctgtgtcatcaagtattatagtcagacttttctttttttctagattgttaaaattggcaaatgaacttttttaaaaatcannnnnnannnnnnannnagtctttcttttcattacaagtctttcacagaagtttggtggtaatattgaaagaactagcattgggcagaatgtgtcttt

SEQ ID NO: 5171 - DNA, 204 bp, Homo sapiens
  misc_feature (65)..(65): n includes a, c, g, or t, or contains no nucleotide
gaattcgcttccacctgtccagatgatgaggagatcgagctcgcctatgagcaagtggcaaaggnccctcaaataagcccctcctgggactccctcaaccccctccattttctccacaaaggccctggtggtttccacattgctacccaatggacacactccaaaatggccagtgggcagggaatcctggagcacttgttccgg

SEQ ID NO: 5172 - DNA, 496 bp, Homo sapiens
  misc_feature (336)..(359): n includes a, c, g, or t, or contains no nucleotide
ggaacacgccatggaaaccatgatgtttacatttcacaaattcgctggggataaaggctacttaacaaaggaggacctgagagtactcatggaaaaggagttccctggatttttggaaaatcaaaaagaccctctggctgtggacaaaataatgaaggacctggaccagtgtagagatggcaaagtgggcttccagagcttcttttccctaattgcgggcctcaccattgcatgcaatgactattttgtagtacacatgaagcagaagggaaagaagtaggcagaaatgagcagttcgctcctccctgataagagttgtcccaaagggtcgcttannnnnnnnnnnnnnnnnnnnnnnncatagaaggatttcatgagcagatcaggacacttagcaaatgtaaaaataaaatctaactctcatttgacaagcagagaaagaaaagttaaataccagataagcttttgatttttgtattgtttgcatccccttgcc

SEQ ID NO: 5173 - DNA, 518 bp, Homo sapiens
  misc_feature (34)..(34): n includes a, c, g, or t, or contains no nucleotide
  misc_feature (45)..(46): n includes a, c, g, or t, or contains no nucleotide
  misc_feature (60)..(60): n includes a, c, g, or t, or contains no nucleotide
  misc_feature (68)..(71): n includes a, c, g, or t, or contains no nucleotide
  misc_feature (342)..(411): n includes a, c, g, or t, or contains no nucleotide
ttacacattgaggatggagactccatccgcttcngggcgcttcgnnttggagaccagggncagccctnnnnccacaccccaggctgtgtcaccttcgtcctgaatgaccacagcatggccttcactggagatgccctgttgatccgtgggtgtgggcggacagacttccagcaaggctgtgccaagaccttgtaccactcggtccatgaaaagatcttcacacttccaggagactgtctgatctaccctgctcacgattaccatgggttcacagtgtccaccgtggaggaggagaggactctgaaccctcggctcaccctcagctgtgaggagtttgtcaannnnnnnnnnnnnnnnnnnnnnnnnnnnnnnnnnnnnnnnnnnnnnnnnnnnnnnnnnnnnnnnnnnnnnggggtgcagacacccactgcctgatctcacttctgtcagatgctcccatccactattaatgcactaggtgggaggagagggcggcaatgacactgcacctctccttt

SEQ ID NO: 5174 - DNA, 571 bp, Homo sapiens
tcagagcgctgacttcctggacatcaccaaccccaaagccgtattagaaaacgcacttaggaactttgcctgtctgaccaccggggatgtgattgccattaactacaatgaaaagatctacgaactgcgtgtgatggagaccaaacccgacaaggcagtgtccattcatgagtgtgacatgaacgtggactttgatgctcccctgggctacaaagaacccgaaagacaagtccagcatgaggagtcgacagaaggtgaagccgaccacagtggctatgctggagagcttggcttccgcgctttctctggatctggcaatagactggatggaaagaagaaaggggtagagcccagcccctccccaatcaagcctggagatattaaaagaggaattcccaattatgaatttaaacttggtaagataactttcatcagaaattcacgtccccttgtcaaaaaggttgaagaggatgaagctggaggcagattcgtcgctttctctggagaaggacagtcattgcgtaaaaagggaagaaagccctaagtgaggactgttggctgattggaaaat

SEQ ID NO: 5175 - DNA, 517 bp, Homo sapiens
tagtcaccaatgcagcaggagggctgaaccccaagtttgaggttggagatatcatgctgatccgtgaccatatcaacctacctggtttcagtggtcagaaccctctcagagggcccaatgatgaaaggtttggagatcgtttccctgccatgtctgatgcctacgaccggactatgaggcagagggctctcagtacctggaaacaaatgggggagcaacgtgagctacaggaaggcacctatgtgatggtggcaggccccagctttgagactgtggcagaatgtcgtgtgctgcagaagctgggagcagacgctgttggcatgagtacagtaccagaagttatcgttgcacggcactgtggacttcgagtctttggcttctcactcatcactaacaaggtcatcatggattatgaaagcctggagaaggccaaccatgaagaagtcttagcagctggcaaacaagctgcacagaaattggaacagtttgtctccattcttatggccagcattccact

SEQ ID NO: 5176 - DNA, 539 bp, Homo sapiens
  misc_feature (46)..(76): n includes a, c, g, or t, or contains no nucleotide
  misc_feature (325)..(325): n includes a, c, g, or t, or contains no nucleotide
  misc_feature (327)..(328): n includes a, c, g, or t, or contains no nucleotide
  misc_feature (349)..(349): n includes a, c, g, or t, or contains no nucleotide
  misc_feature (372)..(406): n includes a, c, g, or t, or contains no nucleotide
  misc_feature (499)..(513): n includes a, c, g, or t, or contains no nucleotide
cgcctagaagacagcggaactaagaaaagaagaggcctgtggacannnnnnnnnnnnnnnnnnnnnnnnnnnnnnncgaggtagacccagagctaacagaaaagctgaggaaattccgcttccgaaaagagacagacaatgcagccatcataatgaaggtggacaaagaccggcagatggtggtgctggaggaagaatttcagaacatttccccagaggagctcaaaatggagttgccggagagacagcccaggttcgtggtttacagctacaagtacgtgcatgacgatggccgagtgtcctaccctttgtgtttcatcttctncnnccctgtgggctgcaagccggnaacaacagatgatgtatgcaggnnnnnnnnnnnnnnnnnnnnnnnnnnnnnnnnnnncaaaggtgttcgaaatccgcaccactgatgacctcactgaggcctggctccaagaaaagttgtctttctttcgttgatctctgggctggggannnnnnnnnnnnnnnctgagtcctcaaggtgactggggact

SEQ ID NO: 5177 - DNA, 505 bp, Homo sapiens
ctttttcagttaacagatcaaatggatgagttctgagcctctcaagttcctttccccagttagagtggggaactgggcaagtgttaactgtgggactcactgcagcgtcctatcctaaaggcacgagaagacggaaatgcaacctgcggagctgggcttggttcccaggtcacagtttggcccccgctacaggatgctgccctgctcagagagagatttaatagggagctgaaggaatcgttagggggccagggagatgtgactgaggctggctttccacgtgaatgagacggggtcggtggagggtttggtgctacagccagtcagaagatttgcaaatgcgaacacattcctgtgtgaggcacgttaccctttgtcagttattgtgaatatgtgtattttaagcaataagattcagctggtcagacttttctgggcagtctcagtgacgcatttcctgtgctgtgattgttctgaagacagagtggctctaaccactgtgaga

SEQ ID NO: 5178 - DNA, 455 bp, Homo sapiens
  misc_feature (144)..(167): n includes a, c, g, or t, or contains no nucleotide
  misc_feature (195)..(209): n includes a, c, g, or t, or contains no nucleotide
  misc_feature (211)..(211): n includes a, c, g, or t, or contains no nucleotide
  misc_feature (269)..(300): n includes a, c, g, or t, or contains no nucleotide
cacttttggagatgcgtcagtcattgcccttgaattactaaattctggatatgaatttgatgaaggctccatcatctttaataaattcaggtctgtcatctcctataagacagaagaaaagcccatcttttcccttaataccgnnnnnnnnnnnnnnnnnnnnnnnntatctatgacgatattgatgctgacgtnnnnnnnnnnnnnnnangaatacaatctggccaacatcatctactactctctgaaggagtccaccactagtgagnnnnnnnnnnnnnnnnnnnnnnnnnnnnnnnntgccagcaagaatgcttctgagatgattgacaaattgacattgacattcaaccgtacccgccaagctgtcatcacaaaagagttgattgaaattatctctggtgctgcagctctggattaatgaaaatcaagttccatcctcagacaagaggtaa

SEQ ID NO: 5179 - DNA, 543 bp, Homo sapiens
  misc_feature (34)..(60): n includes a, c, g, or t, or contains no nucleotide
  misc_feature (262)..(288): n includes a, c, g, or t, or contains no nucleotide
caccctgcacctggtgctccgtcttagaggtggnnnnnnnnnnnnnnnnnnnnnnnnnnntggtaagaccatcactctcgaagtggagccgagtgacaccattgagaatgtcaaggcaaagatccaagacaaggaaggcatccctcctgaccagcagaggttgatctttgctgggaaacagctggaagatggacgcaccctgtctgactacaacatccagaaagagtccaccctgcacctggtgctccgtctcagaggtggnnnnnnnnnnnnnnnnnnnnnnnnnnntggtaagaccatcaccctcgaggtggagcccagtgacaccatcgagaatgtcaaggcaaagatccaagataaggaaggcatccctcctgatcagcagaggttgatctttgctgggaaacagctggaagatggacgcaccctgtctgactacaacatccagaaagagtccactctgcacttggtcctgcgcttgagggggggtgtctaagtttccccttttaaggtttcaacaaatttcattgcactttcctttca

SEQ ID NO: 5180 - DNA, 595 bp, Homo sapiens
ggcaccgacagcttgactcctacaagaatggtttcctcaacttggccctgcctttctttggtttctctgaaccccttgccgcaccacgtcaccagtactataaccaagagtggacattgtgggatcgctttgaggtacaagggctgcagcctaatggtgaggagatgaccctcaaacagttcctcgactattttaagacagagcacaaattagagatcaccatgctgtcccagggcgtgtccatgctctattccttcttcatgccagctgccaagctcaaggaacggttggatcagccgatgacagagattgtgagccgtgtgtcgaagcgaaagctgggccgccacgtgcgggcgctggtgcttgagctgtgctgtaacgacgagagcggcgaggatgtcgaggttccctatgtccgatacaccatccgctgaccccgtctgctcctctaggctggccccttgtccacccctctccacaccccttccagcccagggttcccatttggcttctggcagtggcccaactagccaagtctggtgttccctcatcatccccctacctgaacccctcttgccactgccttctaccttgt

SEQ ID NO: 5181 - DNA, 241 bp, Homo sapiens
  misc_feature (103)..(104): n includes a, c, g, or t, or contains no nucleotide
  misc_feature (106)..(107): n includes a, c, g, or t, or contains no nucleotide
  misc_feature (112)..(181): n includes a, c, g, or t, or contains no nucleotide
gcatcccctttgctcgaaatggaccccaactgctcttgcgccactggtggctcctgcacgtgcgccggctcctgcaagtgcaaagagtgcaaatgcacctccnntnngcaannnnnnnnnnnnnnnnnnnnnnnnnnnnnnnnnnnnnnnnnnnnnnnnnnnnnnnnnnnnnnnnnnnnnnaaaggggcatcggagaagtgcagctgctgtgcctgatgtgggaacagctcttctcccaga

SEQ ID NO: 5182 - DNA, 278 bp, Homo sapiens
  misc_feature (29)..(51): n includes a, c, g, or t, or contains no nucleotide
  misc_feature (107)..(215): n includes a, c, g, or t, or contains no nucleotide
caaactggccactgacaaaaatgaccccnnnnnnnnnnnnnnnnnnnnnnnacattacctgaatgagcaggtgaaagccatcaaagaattgggtgaacgtgaccaannnnnnnnnnnnnnnnnnnnnnnnnnnnnnnnnnnnnnnnnnnnnnnnnnnnnnnnnnnnnnnnnnnnnnnnnnnnnnnnnnnnnnnnnnnnnnnnnnnnnnnnnnnnnagctgtggggtgacttccctggtcaccaaggcagtgcatgcatgttggggtttcctttacctt

SEQ ID NO: 5183 - DNA, 58 bp, Homo sapiens
gatggtatcccgttgatcctggacaactgcaacatcagtgacagtaacccctttctga

SEQ ID NO: 5184 - DNA, 553 bp, Homo sapiens
  misc_feature (140)..(179): n includes a, c, g, or t, or contains no nucleotide
  misc_feature (214)..(214): n includes a, c, g, or t, or contains no nucleotide
  misc_feature (348)..(348): n includes a, c, g, or t, or contains no nucleotide
  misc_feature (351)..(351): n includes a, c, g, or t, or contains no nucleotide
  misc_feature (460)..(460): n includes a, c, g, or t, or contains no nucleotide
ctctgagacatggaggaagccagtgaaggtggaggaaatgatcgtgtgcggaacctgcaaagtgaggtggagggagttaagaatattatgacccagaatgtggagcggatcctggcccggggggaaaacttggaacatcnnnnnnnnnnnnnnnnnnnnnnnnnnnnnnnnnnnnnnnnagcacttcaagacgacatcgcagaaggtggctcgnaaattctggtggaagaacgtgaagatgattgtccttatctgcgtgattgtttttatcatcatcctcttcattgtgctctttgccactggtgccttctcttaagtaacagggaacctctcccacctgcccttctnttncagggacaaccctccataaatgtgtgccaagagggtctcctttcctgtcttcctctacagagaatgctgctcggtcctcctacccctcttcccgaggccctgctgccangttgtatgccccagaaggtaccttggtcccccggaaggagagaaaaaagagagatggactgtggctgcatttcttgggtccttagagtgggct

SEQ ID NO: 5185 - DNA, 489 bp, Homo sapiens
  misc_feature (43)..(63): n includes a, c, g, or t, or contains no nucleotide
  misc_feature (173)..(173): n includes a, c, g, or t, or contains no nucleotide
  misc_feature (175)..(175): n includes a, c, g, or t, or contains no nucleotide
  misc_feature (178)..(206): n includes a, c, g, or t, or contains no nucleotide
  misc_feature (329)..(355): n includes a, c, g, or t, or contains no nucleotide
gaccctggggtaaagagtgtcactaaaatctacaactactacnnnnnnnnnnnnnnnnnnnnnattgtcatgggcgcctccttccgcaacacgggcgagatcaaagcactggccggctgtgacttcctcaccatctcacccaagctcctgggagagctgctgcaggacaacgncncannnnnnnnnnnnnnnnnnnnnnnnnnnnnggcggcccaagccagtgacctggaaaaaatccacctggatgagaagtctttccgttggttgcacaacgaggaccagatggctgtggagaagctctctgacgggatccgcaagtttgccgctgnnnnnnnnnnnnnnnnnnnnnnnnnnncagaacgaatgttcaatgcagagaatggaaagtagcgcatccctgaggctggactccagatctgcaccgccggccagctgggatctgactgcacgtggcttctgatgaatcttgcgttttttacaaattggagc

SEQ ID NO: 5186 - DNA, 316 bp, Homo sapiens
gagacctggtgctgacagtgctcattgccctggccgtgtacttcctgggccggctggtccctcgggggcgaggggctgcggaggcagcgacccggaaacagcgtatcactgagaccgagtcgccttatcaggagctccagggtcagaggtcggatgtctacagcgacctcaacacacagaggccgtattacaaatgagcccgaatcatgacagtcagcaacatgatacctggatccagccattcctgaagcccaccctgcacctcattccaactcctaccgcgatacagacccacagagtgccatccctgagagac

SEQ ID NO: 5187 - DNA, 428 bp, Homo sapiens
  misc_feature (234)..(240): n includes a, c, g, or t, or contains no nucleotide
  misc_feature (242)..(249): n includes a, c, g, or t, or contains no nucleotide
  misc_feature (252)..(256): n includes a, c, g, or t, or contains no nucleotide
ctgccgagcctctttggacccagatctgttcatgcttttgtcttcgtcactgcggcggggccctttgatgtcttcatctgtatggggtggaaaaatcaccgggaatcccccttcagttctttgaaaaagttccatgactcgaatatctgaaatgaagaaaacaaaccgactcacaaacctccaagtagctccaaatgcaatttttaaaatggaaaacaaaaatctgaaagaaannnnnnnannnnnnnnaannnnnaaaacgtccctaaggcgtcctcgagatgaagacgggggggagcccccagccaggtggagaccccgcaggacgcggcggcgcccggtgaccgaggcctcgcacagccggccgccctgagggtcgggccggagccagggtccaagaggggcgcgtttgtgtctcgggttaaaat

SEQ ID NO: 5188 - DNA, 250 bp, Homo sapiens
  misc_feature (27)..(27): n includes a, c, g, or t, or contains no nucleotide
  misc_feature (56)..(56): n includes a, c, g, or t, or contains no nucleotide
  misc_feature (89)..(89): n includes a, c, g, or t, or contains no nucleotide
  misc_feature (100)..(100): n includes a, c, g, or t, or contains no nucleotide
  misc_feature (105)..(105): n includes a, c, g, or t, or contains no nucleotide
  misc_feature (110)..(127): n includes a, c, g, or t, or contains no nucleotide
  misc_feature (129)..(133): n includes a, c, g, or t, or contains no nucleotide
  misc_feature (140)..(141): n includes a, c, g, or t, or contains no nucleotide
  misc_feature (156)..(158): n includes a, c, g, or t, or contains no nucleotide
  misc_feature (163)..(163): n includes a, c, g, or t, or contains no nucleotide
  misc_feature (167)..(167): n includes a, c, g, or t, or contains no nucleotide
  misc_feature (190)..(190): n includes a, c, g, or t, or contains no nucleotide
agcgggctggatcctgtcacacctggnagacctacaggaggccagagtgaaggggntccgttctgtccctcacactgtgacctgaccangccccaccggncccantcctnnnnnnnnnnnnnnnnnntnnnnnttgtggnnccggcctcccctggnnnatcantgtncattcaattccagtcacctcttnctgcaatcatgacctcttgatgtctccatggtgacctccttgggggtcactgaccctgct

SEQ ID NO: 5189 - DNA, 511 bp, Homo sapiens
aggacctaaaagcactttatgtagtttttaattaatcttaagatctggttacggtaactaaaagcctgtctgccaaatccagtggaaacaagtgcatagatgtgaattggtttttaggggccccacttcccaattcattaggtatgactgtggaaatacagacaaggacttagttgatattttgggcttggggcagtgagggcttaggacaccccaagtggtttgggaaaggaggagggagtggtgggtttataggggaggaggaggcaggtggtctaagtgctgactggctacgtagttcgggcaaatcctccaaaagggaaagggaggatttgcttagaaggatggggctcccagtgactactttttgacttctgtttgtcttacgcttctctcagggaaaaacatgcagtcctctagtgtttcatgtacattctgtggggggtgaacaccttggttctggttaaacagctgtacttttgatagctgtgccaggaagggttaggaccaa

SEQ ID NO: 5190 - DNA, 576 bp, Homo sapiens
  misc_feature (326)..(352): n includes a, c, g, or t, or contains no nucleotide
gagcctaaccatgtccctgaacaaaaattgggcactcatctattccttttctcttgtgtccctactcattgaaaccaaactctggaaaggacccaatgtaccagtatttatacctctaatgaagcacagagagaggaagagagctgcttaaactcacacaacaatgaactgcagacacagctgttctctccctctctccttcccagagcaatttatactttaccctcaggctgtcctctggggagaaggtgccatggtcttaggtgtctgtgccccaggacagaccctaggaccctaaatccaatagaaaatgcatatctttgctnnnnnnnnnnnnnnnnnnnnnnnnnnnaccttttcttaggatcttgggagggaatggatgcccctctctgcatgatcttgttgaggcatttagctgccatgcacctgtccccctttaatactgggcattttaaagccatctcaagaggcatcttctacatgttttgtacgcattaaaataatttcaaagatatctgagaaaagccgatatttgccattcttcctatatcctggaatatatcttgcatcctg

SEQ ID NO: 5191 - DNA, 517 bp, Homo sapiens
  misc_feature (168)..(189): n includes a, c, g, or t, or contains no nucleotide
  misc_feature (437)..(458): n includes a, c, g, or t, or contains no nucleotide
cccgcactcggtggtgcagtggaacgtgggatcccaccaggacatcaccgaagacagcttttccctcttctggttgctggagccccggatagagatcgtggtggtggggactggagaccggaccgagaggctgcagtcccaggtgcttcaagccatgaggcagcgggnnnnnnnnnnnnnnnnnnnnnncacgcccaatgcctgtgccaccttcaacttcctgtgtcatgaaggccgagtaactggagctgctctcatccctccaccaggagggacttcacttacatctttgggccaagctgctcaatgaaccgccaggaactgacctgctgactgcactctgccaggcttcccaatgctttcactcttatctaccctttggcacttatcttgcttatcaacataataatttatacacttctcccaaaaaaaaaaannnnnnnnnnnnnnnnnnnnnngatggctcactgggctcttggaggggaatgtgaagaaaccaaggagtcactttttcatc

SEQ ID NO: 5192 - DNA, 404 bp, Homo sapiens
  misc_feature (95)..(95): n includes a, c, g, or t, or contains no nucleotide
  misc_feature (155)..(155): n includes a, c, g, or t, or contains no nucleotide
  misc_feature (252)..(311): n includes a, c, g, or t, or contains no nucleotide
tgacggcccgcgagcgcttccagaacctggacaagaaggcgagctccgagggtggcacggctgcgggcgcgggcctagactcgctgcacaagaancagcgtcagccagatctcggtgctcagcggcggcaaggccaagtgctcgcagttctgcanccactggcatggatggcggcatgagtatctgggatgtgaagagcttggagtcagccttgaaggacctcaagatcaaatgacctgtgaggaatatgtnnnnnnnnnnnnnnnnnnnnnnnnnnnnnnnnnnnnnnnnnnnnnnnnnnnnnnnnnnnntttgctgaatgtttctggggtaccaatacgagttcccataggggctgctccctcaaaaagggaggggacagatggggagcttttcttacctat

SEQ ID NO: 5193 - DNA, 548 bp, Homo sapiens
  misc_feature (26)..(26): n includes a, c, g, or t, or contains no nucleotide
  misc_feature (43)..(43): n includes a, c, g, or t, or contains no nucleotide
  misc_feature (49)..(51): n includes a, c, g, or t, or contains no nucleotide
  misc_feature (370)..(388): n includes a, c, g, or t, or contains no nucleotide
  misc_feature (468)..(468): n includes a, c, g, or t, or contains no nucleotide
taatcggctcactataggaatttgcntcgaggccaagattcgnacgagnnngttcaaaagcagctaaaccaaaagaagcctccagacagccctgagatcacctaaaaagctgctaccaagacagccacgaagatcctaccaaaatgaagcgcttcctcttcctcctactcaccatcagcctcctggttatggtacagatacaaactggactctcaggacaaaacgacaccagccaaaccagcagcccctcagcatccagcagcatgagcggaggcattttccttttcttcgtggccaatgccataatccacctcttctgcttcagttgaggtgacacgtctcagccttagccctgtgccccctgaaacannnnnnnnnnnnnnnnnnnagagaatcccctccatctttgggaggggttgatgccagacatcaccaggttgtagaagttgacaggcagtgccatggggncaacagccaaaataggggggtaatgatgtaggggccaagcagtgcccagctgggggtcaataaagttacccttgtacttg

SEQ ID NO: 5194 - DNA, 403 bp, Homo sapiens
  misc_feature (35)..(61): n includes a, c, g, or t, or contains no nucleotide
  misc_feature (127)..(165): n includes a, c, g, or t, or contains no nucleotide
gtttaacatccagcactgtaagaagctgtccagcnnnnnnnnnnnnnnnnnnnnnnnnnnnaatgccaccgccatcttcttcctgcctgatgaggggaaactacagcacctggaaaatgaactcacnnnnnnnnnnnnnnnnnnnnnnnnnnnnnnnnnnnnnnnaaggtctgccagcttacatttacccaaactgtccattactggaacctatgatctgaagagcgtcctgggtcaactgggcatcactaaggtcttcagcaatggggctgacctctccggggtcacagaggaggcacccctgaagctctccaaggccgtgcataaggctgtgctgaccatcgacgagaaagggactgaagctgctggggccatgtttttagaggccatacccatgtctatc

SEQ ID NO: 5195 - DNA, 296 bp, Homo sapiens
  misc_feature (169)..(190): n includes a, c, g, or t, or contains no nucleotide
gtcaccgttcgagcagcgcgcctatccgcacgtcttcactaaaggaatccccaatgttctgcgccgcattcgggagtctttctttcgcgtggtgccgcagtttgtagtgttttatcttatctacacatgggggactgaagagttcgagagatccaagaggaagaatccnnnnnnnnnnnnnnnnnnnnnntgagcaacgcatccggatgacggttccctgtctctgaaagacctttctctggaagaggagtctgcattgtagtgtctcaaagacacaataaacttcctatggtctg

SEQ ID NO: 5196 - DNA, 341 bp, Homo sapiens
  misc_feature (26)..(40): n includes a, c, g, or t, or contains no nucleotide
  misc_feature (122)..(138): n includes a, c, g, or t, or contains no nucleotide
aacactagggctgttgtacaaaatannnnnnnnnnnnnnngaagttttaccttattctgtgagaagtgttcttaaacttattaagtgtctaaactaaggtttagtgcttttttaaaggaaannnnnnnnnnnnnnnnntcctaaagaaagcaaaagttaattcaactgatccaccaatggaattagatgggtagagttgggttcttgagttttaccaccacttagttcccactgaattttgtaacttcctgtgtttgcatcctctgttcctattctgcccttgctctgtgtcatctcagtcatttgacttagaaagtgcccttcaaaaggaccctgttcac

SEQ ID NO: 5197 - DNA, 481 bp, Homo sapiens
atccagagcacagatctgtttcgtgcattggaagaccccacccaagcttggcagccgagctcgtgtatcctggggctcccttcatctccagggagtcccctccccggccctaccagcgcccgctgggctgagcccctaccccacaccaggccgtcctcccgggccctcccttggaaacctgccctgcctgagggcccctctgcccagcttgggcccagctgggctctgccaccctacctgttcagtgtcccgggcccgttgaggatgaggccgctagaggcctgaggatgagctggaaggagtgagaggggacaaaacccaccttgttggagcctgcagggtggtgctgggactgagccagtcccaggggcatgtattggcctggaggtggggttgggattgggggctggtgccagccttcctctgcagctgacctctgttgtcctccccttgggcggctgagagccccagctgacatgga

SEQ ID NO: 5198 - DNA, 377 bp, Homo sapiens
  misc_feature (43)..(43): n includes a, c, g, or t, or contains no nucleotide
ttcccaattcattaggtatgactgtggaaatacagacaaggantcttagttgatattttgggcttggggcagtgagggcttaggacaccccaagtggtttgggaaaggaggaggggagtggtgggtttatagggggaggaggaggcaggtggtctaagtgctgactggctacgtagttcgggcaaatcctccaaaagggaaagggaggatttgcttagaaggatggcgctcccagtgactactttttgacttctgtttgtcttacgcttctctcagggaaaaacatgcagtcctctagtgtttcatgtacattctgtggggggtgaacaccttggttctggttaaacagctgtacttttgatagctgtgccaggaag

SEQ ID NO: 5199 - DNA, 459 bp, Homo sapiens
  misc_feature (73)..(88): n includes a, c, g, or t, or contains no nucleotide
  misc_feature (185)..(185): n includes a, c, g, or t, or contains no nucleotide
  misc_feature (187)..(188): n includes a, c, g, or t, or contains no nucleotide
  misc_feature (192)..(193): n includes a, c, g, or t, or contains no nucleotide
  misc_feature (196)..(200): n includes a, c, g, or t, or contains no nucleotide
  misc_feature (202)..(205): n includes a, c, g, or t, or contains no nucleotide
  misc_feature (215)..(222): n includes a, c, g, or t, or contains no nucleotide
  misc_feature (224)..(227): n includes a, c, g, or t, or contains no nucleotide
  misc_feature (261)..(288): n includes a, c, g, or t, or contains no nucleotide
  misc_feature (390)..(433): n includes a, c, g, or t, or contains no nucleotide
atggtaccccttctagtgaggattcaaattcttcttgtgaagtgatgcagctgacctacctgccaacctctcnnnnnnnnnnnnnnnntatcatccccattactgatatcagggctttcacaacaacactcaaccttctcccctaccataaaatagtcaaataaataaactgcagtcacgttggncnngaannaannnnnannnnaaaaaaaaannnnnnnnannnnatggagttagttatactactgccttagggcttcnnnnnnnnnnnnnnnnnnnnnnnnnnnnatttgatttactttttatcctttgttgagactaataaacccagggttactgtaggagctggcaaaggaaaattagcagaatgggccaagcgagaccagaaannnnnnnnnnnnnnnnnnnnnnnnnnnnnnnnnnnnnnnnnnnnactgtgattcttcttcttgaaaggcc

SEQ ID NO: 5200 - DNA, 560 bp, Homo sapiens
  misc_feature (29)..(30): n includes a, c, g, or t, or contains no nucleotide
  misc_feature (50)..(51): n includes a, c, g, or t, or contains no nucleotide
  misc_feature (61)..(61): n includes a, c, g, or t, or contains no nucleotide
  misc_feature (71)..(73): n includes a, c, g, or t, or contains no nucleotide
  misc_feature (77)..(100): n includes a, c, g, or t, or contains no nucleotide
  misc_feature (102)..(102): n includes a, c, g, or t, or contains no nucleotide
  misc_feature (105)..(105): n includes a, c, g, or t, or contains no nucleotide
  misc_feature (108)..(108): n includes a, c, g, or t, or contains no nucleotide
  misc_feature (111)..(116): n includes a, c, g, or t, or contains no nucleotide
  misc_feature (118)..(119): n includes a, c, g, or t, or contains no nucleotide
  misc_feature (132)..(132): n includes a, c, g, or t, or contains no nucleotide
  misc_feature (154)..(154): n includes a, c, g, or t, or contains no nucleotide
  misc_feature (185)..(185): n includes a, c, g, or t, or contains no nucleotide
  misc_feature (187)..(187): n includes a, c, g, or t, or contains no nucleotide
  misc_feature (197)..(203): n includes a, c, g, or t, or contains no nucleotide
  misc_feature (227)..(227): n includes a, c, g, or t, or contains no nucleotide
  misc_feature (234)..(234): n includes a, c, g, or t, or contains no nucleotide
  misc_feature (246)..(246): n includes a, c, g, or t, or contains no nucleotide
  misc_feature (255)..(255): n includes a, c, g, or t, or contains no nucleotide
  misc_feature (264)..(264): n includes a, c, g, or t, or contains no nucleotide
  misc_feature (284)..(284): n includes a, c, g, or t, or contains no nucleotide
  misc_feature (291)..(291): n includes a, c, g, or t, or contains no nucleotide
  misc_feature (298)..(298): n includes a, c, g, or t, or contains no nucleotide
  misc_feature (306)..(306): n includes a, c, g, or t, or contains no nucleotide
  misc_feature (450)..(450): n includes a, c, g, or t, or contains no nucleotide
ggctacgacgacttcaactgcaacatctnngggatgccatgaagggcgannccgtgcaggnagtcctcgcnnntggnnnnnnnnnnnnnnnnnnnnnnnncntcnggntcnnnnnncnnatggcatggctgntggccacgggctcctgggactnccttcctcaagatctggaactaatggccccnancccccactgnnnnnnnggcccaggccaggaggggccctgncccatgncccacactacanggccagggnctgcggggntggcgcaatcccagcccccnttccccngggccancggggccnttgggtccctgccctcccacccaggtttggttcctcccggggcccccactgtggagataagaaggggatggaatgggggaagaggaggagcaggaggccctcatccttctgctgccctggggttggggcctcacccctctgganggccggaggcaggaggtggaaaccccaggggctggcttttttaaaactggttttattttaatttttattatattttcagtttttccataaaggagccaattccaactctg

SEQ ID NO: 5201 - DNA, 392 bp, Homo sapiens
  misc_feature (122)..(122): n includes a, c, g, or t, or contains no nucleotide
  misc_feature (215)..(215): n includes a, c, g, or t, or contains no nucleotide
  misc_feature (222)..(225): n includes a, c, g, or t, or contains no nucleotide
  misc_feature (228)..(231): n includes a, c, g, or t, or contains no nucleotide
  misc_feature (233)..(233): n includes a, c, g, or t, or contains no nucleotide
aaactacactcagctcgtcgacctgcacgcccgatacgctgagtgtggtttgcggatcctggccttcccgtgtaaccagttcgggaagcaggagccagggagtaacgaagagatcaaagagnttcgccgcgggctacaacgtcaaattcgatatgttcagcaagatctgcgtgaacggggacgacgcccacccgctgtggaagtggatgaagatnccaaccnnnncannnnangggcaagggcatcctgggaaatgccatcaagtggaacttcaccaagttcctcatcgacaagaacggctgcgtggtgaagcgctacggacccatggaggagcccctggtgatagagaaggacctgccccactatttctagctccacaagtgtgtggcccc

SEQ ID NO: 5202 - DNA, 416 bp, Homo sapiens
  misc_feature (120)..(137): n includes a, c, g, or t, or contains no nucleotide
  misc_feature (363)..(363): n includes a, c, g, or t, or contains no nucleotide
  misc_feature (365)..(370): n includes a, c, g, or t, or contains no nucleotide
gaaactgtgccttcgtcacctatgaaaagatggagtcagcagatcaggccgttgctgagctcaacgggacccaggtggagtctgtacagctcaaagtcaacatagcccgaaaacagcccnnnnnnnnnnnnnnnnnnggcaagtctgtctggggctccctcgctgtccagaacagccctaagggttgccaccgggacaagaggacccagattgtctacagtgatgacgtctacaaggaaaaccttgtggatggcttctagggaacagagctggattccttgtgcctcatatgccccaatgctggtctcagtaaaacactgaggtggaagcttaaaaaaaaaaaaaaaaaaaaaaaaaaaaaanannnnnnattggggttaaagcctttaaaaacggctgtcaggtttgatctcagt

SEQ ID NO: 5203 - DNA, 511 bp, Homo sapiens
  misc_feature (130)..(130): n includes a, c, g, or t, or contains no nucleotide
  misc_feature (134)..(139): n includes a, c, g, or t, or contains no nucleotide
  misc_feature (142)..(143): n includes a, c, g, or t, or contains no nucleotide
  misc_feature (149)..(151): n includes a, c, g, or t, or contains no nucleotide
  misc_feature (472)..(473): n includes a, c, g, or t, or contains no nucleotide
  misc_feature (475)..(476): n includes a, c, g, or t, or contains no nucleotide
  misc_feature (479)..(480): n includes a, c, g, or t, or contains no nucleotide
tgctcggcctctacggtctcatcgtcgccctcatcctctccacaaagtagaccctctccgagcccaccagccacagaatattatgtaaagaccacccctcctcattccagaacgaacagcctgacacatnacgnnnnnnggnngccgcnnnccccagtagttggtcttgtacatgcgcagtgtcctagtgcccatcgtctgtttccccggccttgcccccgcccgccccgtgccgtggacatctgggcccactcatcgcccctccaggcccccggcgccccaccccctagagtgctctgtgtatgcggatgatttagaattgtcatttctctttactggatgtttatttataaagatctggcctgttcctgcgtctgcggagcggcccttgtctcccagctatctataaccttagctagagtgtcgccttgtgggttcctgttgctgagacttcctggatggagccgccctnncnnccnngcccgtggccctgcgcggagctgtgtccaat

SEQ ID NO: 5204 - DNA, 252 bp, Homo sapiens
  misc_feature (36)..(36): n includes a, c, g, or t, or contains no nucleotide
  misc_feature (76)..(91): n includes a, c, g, or t, or contains no nucleotide
cgagcctgacatcgaagccctgctgtctcaagggcncagctgtgcctagggcgcccctcctaccccggctgcttgnnnnnnnnnnnnnnnntgtctcgggggggttttcatctatgagggtgtttcctctaaacctacgagggaggaacacctgatcttacagaaaataccacctcgagatgggtgctggtcctgttgatcccagtctctgccagaccaaggcgagtttccccactaataaagtgccgggtg

SEQ ID NO: 5205 - DNA, 541 bp, Homo sapiens
  misc_feature (159)..(195): n includes a, c, g, or t, or contains no nucleotide
  misc_feature (288)..(302): n includes a, c, g, or t, or contains no nucleotide
ccactgtaatagcatagggattttggaagcagctgctggtggcttgggacatcagtggggccaagggttctctgtccctggttcaactgtgatttggctttcccgtgtctttcctggtgatgccttgtttggggttctgtgggtttgggtgggaagagnnnnnnnnnnnnnnnnnnnnnnnnnnnnnnnnnnnnnggccctgcgggcctggcttgtgtgagcgtgtggacagtggtggccgcgctgtgcctgctcgtgttgcctacatgtccctggctgttgaggcgnnnnnnnnnnnnnnncccctcccttgtctcatagatgctccttttgaccttttcaaataaatatggatggcgagctcctaggcctctggcttcctggtagagggcggcatgccgaagggtctgctgggtgtggattggatgctggggtgtgggggttggaagctgtctgtggcccacttgggcacccacgcttctgtccacttctggttgccaggagacagcaagcaaagccagcaggacatgaagttgctatt

SEQ ID NO: 5206 - DNA, 240 bp, Homo sapiens
  misc_feature (132)..(159): n includes a, c, g, or t, or contains no nucleotide
  misc_feature (215)..(215): n includes a, c, g, or t, or contains no nucleotide
tcaccctcgtttccagtgaattagtgtcatgtcagcatcagctcagggcttcatcgtggggctctcagttccgatttcccaggctgaattgggagtgagatgcctgcatgctgggttctgcacagctggccnnnnnnnnnnnnnnnnnnnnnnnnnnnnaagggaggagcgccctctagggagggacatggccccggtgcggctgcagctcaccnagccccaggggcagaagagacccaa

SEQ ID NO: 5207 - DNA, 535 bp, Homo sapiens
aattactctccaagttgagagatgtctttgggttaaattaaaagccctacctaaaactgaggtggggatggggagagcctttgcctccaccattcccacccaccctccccttaaaccctctgcctttgaaagtagatcatgttcactgcaatgctggacactacaggtatctgtccctgggccagcagggacctctgaagccttctttgtggccttttttttttttcatcctgtggtttttctaatggactttcaggaattttgtaatctcataactttccaagctccaccacttcctaaatcttaagaactttaattgacagtttcaattgaaggtgctgtttgtagacttaacacccagtgaaagcccagccatcatgacaaatccttgaatgttctcttaagaaaatgatgctggtcatcgcagcttcagcatctcctgttttttgatgcttggctccctctgctgatctcagtttcctggcttttcctccctcagccccttctcacccctttgctgtcctgtgtagtgatt

SEQ ID NO: 5208 - DNA, 498 bp, Homo sapiens
  misc_feature (77)..(91): n includes a, c, g, or t, or contains no nucleotide
  misc_feature (218)..(220): n includes a, c, g, or t, or contains no nucleotide
  misc_feature (222)..(268): n includes a, c, g, or t, or contains no nucleotide
  misc_feature (425)..(425): n includes a, c, g, or t, or contains no nucleotide
tcctgccttcctgagggccagaggggagccccaggacccattaagccacccccgtgttcctgccgtcagtgccaacnnnnnnnnnnnnnnncatctacccgttcactccagtcccaccccacgcctgactcccctctggaaactgcaggccagatggttgctgccacaacttgtgtaccttcagggatggggctcttactccctcctgaggccagctnnncnnnnnnnnnnnnnnnnnnnnnnnnnnnnnnnnnnnnnnnnnnnnnnnaaatgagtgtctcagaagtgtgctcctctggcctcagttctcctcttttggaacaacataaaacaaatttaattttctacgcctctggggatatctgctcagccaatggaaaatctgggttcaaccagcccctgccatttcttaagactttctgctncactcacaggatcctgagctgcacttacctgtgagagtcttcaaacttttaaaccttgccagtcaggactttt

SEQ ID NO: 5209 - DNA, 569 bp, Homo sapiens
  misc_feature (37)..(37): n includes a, c, g, or t, or contains no nucleotide
tgcctcagtgaaatatgcatatgtatatcatgaaagngggatgccaagtaagcttaaaatggcattctctagcaaagagattagacttttaaataactcttataaaacaggttggcgatcatttcccaagattggtttcccttgagtttttgctaaaacaaatcttagtagttttgcccgtttaaaacaactcacaatcgtaaatgctactattcctaagatatcttacctttttatttcagtttagccatgtattgtatgagtgtattagtctaagcagtgagaatcttttctatgcctctattccagcaaaaagtagaagtatcaaataaaaagggcaacttttaaaatattaagcctgaagacttctaaaaagacaagaaacatggcctaaataaccaacatagatttacatagtaagtttcacactaccttattaccaaaagcaaacacctcttactttaaactacattatcatgtatatctattgtatgctggtctttactttttgccaaaatcaacatataatgaagagatgcctttgtttcatgagattcaaacttgatgct

SEQ ID NO: 5210 - DNA, 451 bp, Homo sapiens
tgtcataaagcttcaccaatcaagtcccatggaaaagacttaatgtaacaactcttctgttcattagcattgtgttgtggtccctatggctgtttactatccaaaagttcaagagagaaaacagcacttgaggtctcatcaattaaagcaccttgtggaatctgtttcctatatttgaatattagatgggaaaattagtgtctagaaatactctcccattaaagaggaagagaagattttaaagacttaatgatgtcttattgggcataaaactgagtgtcccaaaggtttattaataacagtagtagttatgtgtacaggtaatgtatcatgatccagtatcacagtattgtgctgtttatatacatttttagtttgcatagatgaggtgtgtgtgtgcgctgcttcttgatctaggcaaacctttataaagttgcagtacctaatctgt

SEQ ID NO: 5211 - DNA, 161 bp, Homo sapiens
cccagcaagagcacaagaggaagagagagaccctcactgctggggagtccctgccacactcagtcccccaccacactgaatctcccctcctcacagttgccatgtagaccccttgaagaggggaggggcctagggagccgcaccttgtcatgtaccatcaa

SEQ ID NO: 5212 - DNA, 487 bp, Homo sapiens
  misc_feature (45)..(45): n includes a, c, g, or t, or contains no nucleotide
  misc_feature (78)..(78): n includes a, c, g, or t, or contains no nucleotide
  misc_feature (81)..(136): n includes a, c, g, or t, or contains no nucleotide
  misc_feature (273)..(298): n includes a, c, g, or t, or contains no nucleotide
ggcagacgctggagcacagcaccgtcctggggctgcccgcagggnccgaggagcgggcccggaaggagctcgccaggnaannnnnnnnnnnnnnnnnnnnnnnnnnnnnnnnnnnnnnnnnnnnnnnnnnnnnnnntcaacaagtttgacaagaacttctcagcccacctgctggacctcctggcccggctgagcatctatagcaccagtgactgtgagcacggcatggccagcgtcatctccaggcttgacttcaatggtttctacacggannnnnnnnnnnnnnnnnnnnnnnnnnggagccagaaggccaccccccaagtgcctgtcctgcgggggcccccggctcctgcacccagggtcgcagtcaccgcacagtgagccctggctgtgacaggaaggaagggtgtggggtcagcagggactggtgcaaatgggtccagaattttcaaatcgaatgctctgtgttctgtctttgcagtttaaa

SEQ ID NO: 5213 - DNA, 416 bp, Homo sapiens
  misc_feature (35)..(35): n includes a, c, g, or t, or contains no nucleotide
  misc_feature (38)..(38): n includes a, c, g, or t, or contains no nucleotide
  misc_feature (41)..(45): n includes a, c, g, or t, or contains no nucleotide
  misc_feature (47)..(47): n includes a, c, g, or t, or contains no nucleotide
  misc_feature (49)..(49): n includes a, c, g, or t, or contains no nucleotide
  misc_feature (54)..(54): n includes a, c, g, or t, or contains no nucleotide
  misc_feature (56)..(57): n includes a, c, g, or t, or contains no nucleotide
  misc_feature (59)..(60): n includes a, c, g, or t, or contains no nucleotide
  misc_feature (62)..(63): n includes a, c, g, or t, or contains no nucleotide
  misc_feature (65)..(72): n includes a, c, g, or t, or contains no nucleotide
  misc_feature (74)..(78): n includes a, c, g, or t, or contains no nucleotide
  misc_feature (86)..(88): n includes a, c, g, or t, or contains no nucleotide
  misc_feature (90)..(91): n includes a, c, g, or t, or contains no nucleotide
  misc_feature (93)..(94): n includes a, c, g, or t, or contains no nucleotide
  misc_feature (97)..(101): n includes a, c, g, or t, or contains no nucleotide
  misc_feature (103)..(147): n includes a, c, g, or t, or contains no nucleotide
  misc_feature (149)..(150): n includes a, c, g, or t, or contains no nucleotide
  misc_feature (152)..(157): n includes a, c, g, or t, or contains no nucleotide
  misc_feature (160)..(162): n includes a, c, g, or t, or contains no nucleotide
  misc_feature (164)..(166): n includes a, c, g, or t, or contains no nucleotide
  misc_feature (168)..(168): n includes a, c, g, or t, or contains no nucleotide
  misc_feature (171)..(171): n includes a, c, g, or t, or contains no nucleotide
  misc_feature (174)..(210): n includes a, c, g, or t, or contains no nucleotide
caaacattgggataccgacacagacaacttgagancanttnnnnnantnttttnanncnntnnannnnnnnngnnnnntgctgctnnngnncnngannnnnannnnnnnnnnnnnnnnnnnnnnnnnnnnnnnnnnnnnnnnnnnnntnnannnnnnatnnncnnngnttnggnnnnnnnnnnnnnnnnnnnnnnnnnnnnnnnnnnnnntgtattatgtcaaatgttatggcagggcccaaatagcatagccacaagtttggtttatgtgggcataaaattctaaccaaaccccagacatagggagtcatttggagaaagcctgtatgtggtgttttaacctaataaagttgatgagagagaaggggagaggaagcgaacataaagcgggtcaagtgtagtgcatcttttgtatc

SEQ ID NO: 5214 - DNA, 385 bp, Homo sapiens
  misc_feature (300)..(321): n includes a, c, g, or t, or contains no nucleotide
  misc_feature (326)..(326): n includes a, c, g, or t, or contains no nucleotide
cagtcatgccgaagcacgagttctctgtggacatgacctgtggaggctgtgctgaagctgtctctcgggtcctcaataagcttggaggagttaagtatgacattgacctgcccaacaagaaggtctgcattgaatctgagcacagcatggacactctgcttgcaaccctgaagaaaacaggaaagactgtttcctaccttggccttgagtagcaggggcctggtccccacagcccacaggatggaccaaagggggcaggatgctgatcctcccgctggcttccagacagacctgggactnnnnnnnnnnnnnnnnnnnnnntgttnctgcggagaccctcagttgtcctattccttcctagcttccctgcaataaaatcaagctg

SEQ ID NO: 5215 - DNA, 245 bp, Homo sapiens
cctagggtaccagcaggcagagccttgccctctgctcaggctggggtccagtgggaggggcccaaaatctctgctcagagaagtgcagggggagccttccagctcactctccctgaggactggcgtgacaggggctatgggtgttgtttttaaaaaaagaaaatatatttttttgaaaaaacgactgcccatcccgggtcctttccctgatgggttggggcagttacctggttgctgttttaatt

SEQ ID NO: 5216 - DNA, 542 bp, Homo sapiens
  misc_feature (26)..(26): n includes a, c, g, or t, or contains no nucleotide
  misc_feature (28)..(31): n includes a, c, g, or t, or contains no nucleotide
  misc_feature (33)..(58): n includes a, c, g, or t, or contains no nucleotide
  misc_feature (208)..(208): n includes a, c, g, or t, or contains no nucleotide
  misc_feature (284)..(284): n includes a, c, g, or t, or contains no nucleotide
  misc_feature (474)..(479): n includes a, c, g, or t, or contains no nucleotide
  misc_feature (481)..(483): n includes a, c, g, or t, or contains no nucleotide
  misc_feature (485)..(486): n includes a, c, g, or t, or contains no nucleotide
  misc_feature (488)..(488): n includes a, c, g, or t, or contains no nucleotide
  misc_feature (505)..(507): n includes a, c, g, or t, or contains no nucleotide
  misc_feature (509)..(511): n includes a, c, g, or t, or contains no nucleotide
gttttcaactccaaaccccagagagngnnnntnnnnnnnnnnnnnnnnnnnnnnnnnntgtgtggaaatgtctcgtggggtggcatcggggctgcggggtggggaccccaaggctttctggggcagacccttgtcctctgggatgatgggcactgctatccacagtctctgccagttggttttatttggaggtttgtgggcttttttnaaaaaaaaaaagtcctcaaatcaggaagaaacatcaaagactatgtcctagtggagggagtaatcctaacacccangctggccgccagctggcacctgcctctatcccagactgccctcgtcccagctctctgtccaactgttgattatgtgatttttctgatacgtccattctcaaatgccagtgtgttcacatcttcgctctggccagcccattctgtatttaaagcttttgaggcccaataaaatagtacgtgctgtctgcannnnnnannnannanaaaaaaaaaaaaaaaannnannnttggcagcttcacccaggaggagacctggac

SEQ ID NO: 5217 - DNA, 241 bp, Homo sapiens
  misc_feature (164)..(164): n includes a, c, g, or t, or contains no nucleotide
actgtgctcacttccatccagacggcaggtggaatgacgacgtctgccagaggccctaccactgggtctgcgaggctggcctgggtcagaccagccaggagagtcactgagctgcctttggtgggaccacccggccacagaaatggcggtgggaggaggactcntctcacgacctcctcgcaagaccgctctgggagagaaataagcactgggagattggaagcactgctaacattttgaa

SEQ ID NO: 5218 - DNA, 451 bp, Homo sapiens
  misc_feature (125)..(165): n includes a, c, g, or t, or contains no nucleotide
  misc_feature (239)..(270): n includes a, c, g, or t, or contains no nucleotide
  misc_feature (278)..(278): n includes a, c, g, or t, or contains no nucleotide
  misc_feature (280)..(281): n includes a, c, g, or t, or contains no nucleotide
  misc_feature (347)..(368): n includes a, c, g, or t, or contains no nucleotide
aaccctgggtctaggcgagccacagggtgaggtcaaggtgagcattctgggaacaatatttgggctcagagggtgggttggccaccttctgagccccacccccgccagacctggtgaagaggatnnnnnnnnnnnnnnnnnnnnnnnnnnnnnnnnnnnnnnnnngttggaagaaggactggtaggttcccctccaagccagtcacctgtaagagtcctgtcctctgccagactttttnnnnnnnnnnnnnnnnnnnnnnnnnnnnnnnnagccctcntnnacctgaatccagtgctcaactgtgccccggcaacaagacctgggctgaggtctccctggtagaacnnnnnnnnnnnnnnnnnnnnnnatcccagtgcagtcaacagcctggcctatagtcctgggacatgtatcttcttctttgccttaaatctgatacaagaggtcaat

SEQ ID NO: 5219 - DNA, 410 bp, Homo sapiens
  misc_feature (28)..(94): n includes a, c, g, or t, or contains no nucleotide
  misc_feature (98)..(100): n includes a, c, g, or t, or contains no nucleotide
  misc_feature (102)..(102): n includes a, c, g, or t, or contains no nucleotide
  misc_feature (106)..(108): n includes a, c, g, or t, or contains no nucleotide
  misc_feature (110)..(110): n includes a, c, g, or t, or contains no nucleotide
  misc_feature (260)..(260): n includes a, c, g, or t, or contains no nucleotide
  misc_feature (280)..(298): n includes a, c, g, or t, or contains no nucleotide
ggcccagagactgtgcgtgccactaccnnnnnnnnnnnnnnnnnnnnnnnnnnnnnnnnnnnnnnnnnnnnnnnnnnnnnnnnnnnnnnnnnnncccnnngncctnnncnccgcccagtcccgcagtacatcccctgtcccctccccaaccccaagtgccttcatgccctagggccccccaagtgcctgcccctccccagagtattaacgctccaagagtattattaacgctgctgtacctcgatctgaatctgccgggnccccagcccactccaccctnnnnnnnnnnnnnnnnnnntccccacagcctcatcagctctcttcaccgttttttgatactatcttcccccacccccagctacccataggggctgcagagttataagccccaaacaggtcatgctccaata

SEQ ID NO: 5220 - DNA, 60 bp, Homo sapiens
acttgtgggactcacctgactcaaagatgactaatatcgtcccattttggaaataaagca

SEQ ID NO: 5221 - DNA, 238 bp, Homo sapiens
  misc_feature (134)..(184): n includes a, c, g, or t, or contains no nucleotide
attcaagtagagtgtcccagaaaaaaaccacttgggctccctgtttggagtctggctggctctgagcattgccaatggcccctactcacctgactttgtatcctctccttttagaggctttgcattctgcaccnnnnnnnnnnnnnnnnnnnnnnnnnnnnnnnnnnnnnnnnnnnnnnnnnnngggagttatttggccagggccttttgaacagtagtgtccccatgaagtgctaga

SEQ ID NO: 5222 - DNA, 389 bp, Homo sapiens
gactcacctctgtcgcttgggttaaacaagagacaggttttgtagaatattgattggtaatagtaaatcgttctccttacaatcaagttcttgaccctattcggccttatacatctggtcttacaaagaccaaagggatcctgcgcttgatcaactgaaccagtatgccaaaaccaggcatccaatttgtaaaccaattatgataaaggacaaaataagctgtttgccacctcaaaactttatgaacttcaccaccactagtgtctgtccatggagttagaggggacatcacttagaagttcttatagaaaggacacaagtttgtttcctggctttaccttgggaaaatgctagcaacattatagaaattttgccttgttgccttatct

SEQ ID NO: 5223 - DNA, 419 bp, Homo sapiens
  misc_feature (305)..(329): n includes a, c, g, or t, or contains no nucleotide
  misc_feature (331)..(332): n includes a, c, g, or t, or contains no nucleotide
  misc_feature (334)..(334): n includes a, c, g, or t, or contains no nucleotide
  misc_feature (337)..(340): n includes a, c, g, or t, or contains no nucleotide
  misc_feature (343)..(343): n includes a, c, g, or t, or contains no nucleotide
  misc_feature (346)..(351): n includes a, c, g, or t, or contains no nucleotide
  misc_feature (355)..(355): n includes a, c, g, or t, or contains no nucleotide
  misc_feature (357)..(357): n includes a, c, g, or t, or contains no nucleotide
  misc_feature (360)..(360): n includes a, c, g, or t, or contains no nucleotide
  misc_feature (362)..(362): n includes a, c, g, or t, or contains no nucleotide
  misc_feature (364)..(366): n includes a, c, g, or t, or contains no nucleotide
  misc_feature (373)..(373): n includes a, c, g, or t, or contains no nucleotide
ctgcctccgcagaaggaagcctctttctctgtttccctgggtgagggggctggcaggtggctaaccccatttagcatctccaggccctgccatggtgtctcatcttgctgttatctctagctctttccctcctcccatttcctttagtagttgaattttgcaaagcttgtagcagtagctcagttgcctgcagcatccttgtgtgtagataaattagtcgacagaaactcagcactggggacaggattgcaaagtcggggacatagatgcagacagttgttgagatttggggatagccgggcttnnnnnnnnnnnnnnnnnnnnnnnnnanncnttnnnnccnttnnnnnncccngnccntngnnncgatgtntgtgagtttgacctgcccagcgtgtgggctggctcaatgctgaata

SEQ ID NO: 5224 - DNA, 499 bp, Homo sapiens
tgcagctgtggcagagttacagttctgtggtttcatgttagttaccttatagttactgtgtaattagtgccacttaatgtatgttaccaaaaataaatatatctacccagactagatgtagtattttgtataattggattctaatactgtcatctcaagaagtgtatggtttaaagaagtgtattggaaataaagtcagatggaaattcattttaaattcccgtttgtcacttttctgataaaagatggccatattaccccttttcggccccatgtatctcagtaccccatggagctgggctaagtaaataggaattggtttcacgcctcaggcaattagacactttggaagatggcataacctgtctcacctggacttaagcgtctggctctaattcacagtgctctttctcctcactgtatccaggttccctcccagaggagccaccagttctcatgggtggcactcagtctctcttctctccagctgactaaactt

SEQ ID NO: 5225 - DNA, 525 bp, Homo sapiens
  misc_feature (191)..(281): n includes a, c, g, or t, or contains no nucleotide
  misc_feature (358)..(403): n includes a, c, g, or t, or contains no nucleotide
tggccactgcgcagaccagacttcgctcgtactcgtgcgcctcgcttcgcttttcctccgcaaccatgtctgacaaacccgatatggctgagatcgagaaattcgataagtcgaaactgaagaagacagagacgcaagagaaaaatccactgccttccaaagaaacgattgaacaggagaagcaagcaggnnnnnnnnnnnnnnnnnnnnnnnnnnnnnnnnnnnnnnnnnnnnnnnnnnnnnnnnnnnnnnnnnnnnnnnnnnnnnnnnnnnnnnnnnnntaagatgcaaagaggttggatcaagtttaaatgactgtgctgcccctttcacatcaaagaactactgacaacgaagnnnnnnnnnnnnnnnnnnnnnnnnnnnnnnnnnnnnnnnnnnnnnnggaaagaacttgcatgttggtgaaggaagaagtggggtggaagaagtggggtgggacgacagtgaaatctagagtaaaaccaagctggcccaagtgtcctgcaggctgtaatgcagtttaat

SEQ ID NO: 5226 - DNA, 371 bp, Homo sapiens
  misc_feature (182)..(200): n includes a, c, g, or t, or contains no nucleotide
  misc_feature (220)..(221): n includes a, c, g, or t, or contains no nucleotide
  misc_feature (230)..(230): n includes a, c, g, or t, or contains no nucleotide
  misc_feature (234)..(236): n includes a, c, g, or t, or contains no nucleotide
  misc_feature (284)..(285): n includes a, c, g, or t, or contains no nucleotide
cgtgccccagaatgaggcagttggcaaacttctcaggacaatgaatccttcccgtttttctttttatgccacacagtgcattgttttttctacctgcttgtcttatttttagaataatttagaaaaacaaaacaaaggctgtttttcctaattttggcatgaacccccccttgttccaaatnnnnnnnnnnnnnnnnnnnagctccaaaaggaaaagctnnggcggtgcnccannngtgcccgctgcccatcgacgtctgtcctggggacgtggagggtggcanngtccccgcctgcaccagtgccgtcctgctgatgtggtaggctagcaatattttggttaaaatcatgtttgtgactgtaaccatttg

SEQ ID NO: 5227 - DNA, 499 bp, Homo sapiens
ggaactcgatcctgctggctgctgtctctattctctcggcctgtcagcaaagttattttgctttgcaagttggaaaggcaagattaaaatacaaagttacgcccccagcagtcactgggtcaccagagtttgagagagtatttcgggcacaacaaaactgtgtggagttttatcctatattcataattacattgtggatggctgggtggtatttcaaccaagtttttgctacttgtctgggtctggtgtacatatatggccgtcacctatacttctggggatattcagaagctgctaaaaaacggatcaccggtttccgactgagtctggggattttggccttgttgaccctcctaggtgccctgggaattgcaaacagctttctggatgaatatctggacctcaatattgccaagaaactgaggcggcaattctaactttttctcttccctttaatgcttgcagaagctgttcccaccatgaaggtaatatggtatca

SEQ ID NO: 5228 - DNA, 607 bp, Homo sapiens
tctggttggcctttttgaagacaccaacctgtgtgctatccatgccaaacgtgtaacaattatgccaaaagacatccagctagcacgccgcatacgtggagaacgtgcttaagaatccactatgatgggaaacatttcattctcaaaaaaaaaaaaaaaatttctcttcttcctgttattggtagttctgaacgttagatattttttttccatggggtcaaaggtacctaagtatatgattgcgagtggaaaaataggggacagaaatcaggtattggcagtttttccattttcatttgtgtgtgaatttttaatataaatgcggagacgtaaagcattaatgcaagttaaaatgtttcagtgaacaagtttcagcggttcaactttataataattataaataaacctgttaaatttttctggacaatgccagcatttggatttctttaaaacaagtaaatttcttattgatggcaactaaatggtgtttgtagcatttttatcatacagtagattccatccattcactatacttttctaactgagttgtcctacatgcaagtacatgtttttaatgttgtctgtcttctgtgctgttcctgtaagt

SEQ ID NO: 5229 - DNA, 408 bp, Homo sapiens
  misc_feature (29)..(44): n includes a, c, g, or t, or contains no nucleotide
  misc_feature (93)..(116): n includes a, c, g, or t, or contains no nucleotide
  misc_feature (147)..(147): n includes a, c, g, or t, or contains no nucleotide
  misc_feature (196)..(257): n includes a, c, g, or t, or contains no nucleotide
  misc_feature (361)..(378): n includes a, c, g, or t, or contains no nucleotide
atcgcacgtaggtggcgttgttccactcnnnnnnnnnnnnnnnncagccccctggtgcggcccgagaccgggcagagtggacctcacctggannnnnnnnnnnnnnnnnnnnnnnntcagccctggactgttagaggtgctgcagcngctcctgctctctgatcttattgcttataaactttggtgacggtagtgnnnnnnnnnnnnnnnnnnnnnnnnnnnnnnnnnnnnnnnnnnnnnnnnnnnnnnnnnnnnnngtggagtgatggcctcgtctccagtgctcctctgggctcttgagttgctgcttgaattgccgtgtagacatttgcttggagagtccacttgttatttgacggannnnnnnnnnnnnnnnnngttaatgtcaagcatgctaatttaactagt

SEQ ID NO: 5230 - DNA, 445 bp, Homo sapiens
  misc_feature (66)..(66): n includes a, c, g, or t, or contains no nucleotide
  misc_feature (76)..(76): n includes a, c, g, or t, or contains no nucleotide
  misc_feature (130)..(130): n includes a, c, g, or t, or contains no nucleotide
  misc_feature (151)..(151): n includes a, c, g, or t, or contains no nucleotide
  misc_feature (159)..(164): n includes a, c, g, or t, or contains no nucleotide
  misc_feature (166)..(208): n includes a, c, g, or t, or contains no nucleotide
  misc_feature (219)..(219): n includes a, c, g, or t, or contains no nucleotide
  misc_feature (236)..(237): n includes a, c, g, or t, or contains no nucleotide
  misc_feature (298)..(298): n includes a, c, g, or t, or contains no nucleotide
  misc_feature (320)..(320): n includes a, c, g, or t, or contains no nucleotide
  misc_feature (336)..(336): n includes a, c, g, or t, or contains no nucleotide
  misc_feature (343)..(345): n includes a, c, g, or t, or contains no nucleotide
  misc_feature (347)..(369): n includes a, c, g, or t, or contains no nucleotide
tgcaaaagtgcaattccaaaagccaaggtgagaaagaaatgtatacgctgggaatcactaattttncccattcctnggagagcctggttttccacttaacgcaatttatgccaaacctgcaaacaaacanggaagatgaagtgatgagagncctatttnnnnnncnnnnnnnnnnnnnnnnnnnnnnnnnnnnnnnnnnnnnnnnnnnaagttttcganccctcagaatgataaanncccagcaagtggtggacttgctttgtgaagagacagttcatgaacaagagtctttcaggancctggacagtgaagggagcccngggcagccaccgtctnccagagnnncnnnnnnnnnnnnnnnnnnnnnnnatgtacacaatcttttgcctttatttcgtaaagttttatacagaagagagaagagcatgtctttacttgaaaaact

SEQ ID NO: 5231 - DNA, 214 bp, Homo sapiens
  misc_feature (43)..(43): n includes a, c, g, or t, or contains no nucleotide
  misc_feature (118)..(118): n includes a, c, g, or t, or contains no nucleotide
ctagtctgtgatcctgtgtgaagatattttcagggtttttttntttttttttttgcatatggaggacaggtggacatggtcctgagctctggacggagcaggcaccctgatctcattntgaggtccacatggcaccttctgggccagcagctgtggccggtgtatcaagggcgcccttaaagctggaacattccagcaagcttcttgcgcttct

SEQ ID NO: 5232 - DNA, 467 bp, Homo sapiens
  misc_feature (398)..(398): n includes a, c, g, or t, or contains no nucleotide
aagatgattaagaccccagatgacctgcagaaacagaactgttcagtattggttggactgctcatggattttgtagctgtttaaaaaaaaaaaaaaggtagctgtgatacaaaccccaggacacccacccacccaaagagccaaagaatagttcctgtgacattccgccttccttccatgtagtccctcttggtaatctaccaccaagcttgtggacttcaccccaacaaaattgtaagcgttgttaggtttttgtgtaagattcttgctgtagcgtggatagctgtgattggtgagtcaaccgtctgtggctaccagttacactgagattgtaacagcatttttactttctgtacaacaaaaaagctttgtaaataaaatcttaacattttgggtcngttttttcatgctttgctttttaattattattattattttttttacattaggacattttatgtgacaac

SEQ ID NO: 5233 - DNA, 140 bp, Homo sapiens
  misc_feature (91)..(91): n includes a, c, g, or t, or contains no nucleotide
  misc_feature (96)..(96): n includes a, c, g, or t, or contains no nucleotide
cgccatgtgatcctctctgagatcaaggaagccgtcgctgccctgcccccggacgtgaccacgcagtctgtgatggggtttgatcctctgncctcnttcggacacaatctactcctacgtcaggccagagaggctaagtc

SEQ ID NO: 5234 - DNA, 356 bp, Homo sapiens
  misc_feature (26)..(26): n includes a, c, g, or t, or contains no nucleotide
  misc_feature (48)..(74): n includes a, c, g, or t, or contains no nucleotide
  misc_feature (86)..(100): n includes a, c, g, or t, or contains no nucleotide
  misc_feature (237)..(237): n includes a, c, g, or t, or contains no nucleotide
tgctggttgctctgtgctttcacctnaaagctctgccaagcagaggcnnnnnnnnnnnnnnnnnnnnnnnnnnnaagcacctcaannnnnnnnnnnnnnntggtggaagagtttgtggtagcagaagagtgctctccatgctctaatttccgggctaaaactacccctgagtgtggtcccacaggatatgtagagaaaatcacatgcagctcatctaagagaaatgagttcaaaagntgccgctcagctttgatggaacaacgcttattttggaagttcgaaggggctgtcgtgtgtgtggccctgatcttcgcttgtcttgtcatcattcgtcagcgacaattggacagaaaggc

SEQ ID NO: 5235 - DNA, 453 bp, Homo sapiens
  misc_feature (70)..(70): n includes a, c, g, or t, or contains no nucleotide
  misc_feature (100)..(100): n includes a, c, g, or t, or contains no nucleotide
  misc_feature (123)..(123): n includes a, c, g, or t, or contains no nucleotide
  misc_feature (133)..(133): n includes a, c, g, or t, or contains no nucleotide
  misc_feature (302)..(344): n includes a, c, g, or t, or contains no nucleotide
attatgtcaagcttctggagtgactagagctcactgtctactgcaactgtgatttcccatgtccaaagtngctctgcctccaccccctccctattcctgntgcaaatgtctaaccagatgagnttctggacanacttccctctcctgcttcattaagggcttggggcagagacagcatggggaaggaggtccccttccccaagagtcctctctatcctggatgagctcatgaacatttctcttgtgttcctgactccttcccaatgaacacctctctgccaccccaagctctgctctcctcnnnnnnnnnnnnnnnnnnnnnnnnnnnnnnnnnnnnnnnnnnnacgtctagattgtgtggtttgcctcattgtgctatttgcccactttccttccctgaagaaatatctgtgaaccttctttctgttcagtcctaaaattcgaaataaagtg

SEQ ID NO: 5236 - DNA, 505 bp, Homo sapiens
ctctagacatgatcttggacctggagcctgatgaagaactggaagacaaccccaaccagagtgacctgattgagcaggcagccgagatgctttatggattgatccacgcccgctacatccttaccaaccgtggcatcgcccagatgttggaaaagtaccagcaaggagactttggttactgtcctcgtgtgtactgtgagaaccagccaatgcttcccattggcctttcagacatcccaggtgaagccatggtgaagctctactgccccaagtgcatggatgtgtacacacccaagtcatcaagacaccatcacacggatggcgcctacttcggcactggtttccctcacatgctcttcatggtgcatcccgagtaccggcccaagagacctgccaaccagtttgtgcccaggctctacggtttcaagatccatccgatggcctaccagctgcagctccaagccgccagcaacttcaagagcccagtcaagacgattcgctgatt

SEQ ID NO: 5237 - DNA, 549 bp, Homo sapiens
  misc_feature (149)..(163): n includes a, c, g, or t, or contains no nucleotide
  misc_feature (299)..(395): n includes a, c, g, or t, or contains no nucleotide
gtagaacttctctctctgctaaagtaaataatgccagcctgattggactgggttatactcagacccttcgaccaggagtcaaattgactttatcagctttaatcgatgggaagaacttcagtgcaggaggtcacaaggttggcttgggnnnnnnnnnnnnnnnttaatgtggtttgaggaaagcatcagatttgtccctggaagtgaagagaaatgaacccactatgttttggccttaaaattcttctgtgaaatttcaaaagtgtgaactttttattcttccaaagaattgtaatccnnnnnnnnnnnnnnnnnnnnnnnnnnnnnnnnnnnnnnnnnnnnnnnnnnnnnnnnnnnnnnnnnnnnnnnnnnnnnnnnnnnnnnnnnnnnnnnnnttctgaagtgttattaaatgtgttcctcagcgacagtgtagcgtcatgttagaggagacgatctgacccaccagtttgtacatcacgtcctgcatgtcccacaccattttttcatgaccttgtaatatactggtctctgtgctatagtggaatc

SEQ ID NO: 5238 - DNA, 345 bp, Homo sapiens
  misc_feature (78)..(78): n includes a, c, g, or t, or contains no nucleotide
  misc_feature (83)..(97): n includes a, c, g, or t, or contains no nucleotide
  misc_feature (300)..(320): n includes a, c, g, or t, or contains no nucleotide
ccctgtgaactctgttaacagcttacatagggtttcccctttactataactctagcatccccatcccatttgacactnggggnnnnnnnnnnnnnnngcatgtggggtttatacccctcccctgatgaatacagagtggtagctaggggttggttatcatcagaaggtggtctcccctcaggcctgggggataaggacgtgggcccagccacatgccaactcatgtccaatactgctttgcctggtgtggggaaggattgggtcttgtcccccaacacagcttctgtggctgactgtaannnnnnnnnnnnnnnnnnnnncattaaatgctgttgtactctgaaa

SEQ ID NO: 5239 - DNA, 579 bp, Homo sapiens
  misc_feature (94)..(94): n includes a, c, g, or t, or contains no nucleotide
  misc_feature (107)..(107): n includes a, c, g, or t, or contains no nucleotide
  misc_feature (111)..(111): n includes a, c, g, or t, or contains no nucleotide
  misc_feature (115)..(115): n includes a, c, g, or t, or contains no nucleotide
  misc_feature (131)..(131): n includes a, c, g, or t, or contains no nucleotide
  misc_feature (189)..(189): n includes a, c, g, or t, or contains no nucleotide
  misc_feature (225)..(225): n includes a, c, g, or t, or contains no nucleotide
  misc_feature (260)..(260): n includes a, c, g, or t, or contains no nucleotide
  misc_feature (323)..(360): n includes a, c, g, or t, or contains no nucleotide
  misc_feature (384)..(392): n includes a, c, g, or t, or contains no nucleotide
  misc_feature (394)..(400): n includes a, c, g, or t, or contains no nucleotide
  misc_feature (425)..(425): n includes a, c, g, or t, or contains no nucleotide
  misc_feature (427)..(431): n includes a, c, g, or t, or contains no nucleotide
  misc_feature (503)..(503): n includes a, c, g, or t, or contains no nucleotide
agagctctaggtgtttaggcagcgtgtggtgtctgagaggccatagcgccatcatgggctgatttttattaccaggtcccccagaagcaggtgngaggctctgcttncctngctngccgctctgcagcctnggacctgtggaccctggttgtaaagagtaaattgtatcttaggaaaccagtgtcaccntttttttcaccttttaattttatattatttgcgtcnatacatttcctgtaacggaagtgttaattttactngtactttttggtaccttttgggaatctaatgtattgtaaggtattttacacgtgtcctgattnnnnnnnnnnnnnnnnnnnnnnnnnnnnnnnnnnnnnnaaataaaatttaaaaacccccaannnnnnnnnannnnnnnaaaaaaaaaaaaaaaaaaaaaaaanannnnnaagggaggcgggggggggtgccaggtgccctgaacttggggctttctcctgcagcaggctcttccagctgcnggcccagttgtgggggtatcctttaaggactgccctgcctagggctgaaccccccttcaaagaaaggaatgaagag

SEQ ID NO: 5240 - DNA, 590 bp, Homo sapiens
  misc_feature (48)..(114): n includes a, c, g, or t, or contains no nucleotide
  misc_feature (233)..(269): n includes a, c, g, or t, or contains no nucleotide
  misc_feature (284)..(311): n includes a, c, g, or t, or contains no nucleotide
  misc_feature (350)..(350): n includes a, c, g, or t, or contains no nucleotide
  misc_feature (394)..(394): n includes a, c, g, or t, or contains no nucleotide
  misc_feature (535)..(550): n includes a, c, g, or t, or contains no nucleotide
catgccgtggtcaccgtccgagacgccaaacacaccaactttgtggannnnnnnnnnnnnnnnnnnnnnnnnnnnnnnnnnnnnnnnnnnnnnnnnnnnnnnnnnnnnnnnnnnaatgacaacaacctggcttacctggaggccattcacaacttcgtggaggtcttaaacgaatatttccacaatgtctgtgaactggacctggtgttcaacttctacaaggtttacacggnnnnnnnnnnnnnnnnnnnnnnnnnnnnnnnnnnnnnagagaccagccagannnnnnnnnnnnnnnnnnnnnnnnnnnnctacagtccctggagtgagggcaggcgagccccaccccngccccggcccctcctggactcgcctgctcgcttccccttcccangcccgtggccaacccagcagtccttccctcagctgcctaggaggaagggacccagctgggtctgggccacaagggaggagactgcaccccactgcctctgggccctggctgtgggcagaggccaccgtgtgtgtcccgagnnnnnnnnnnnnnnnngtgtgatgccataagcgtctgtgcgtggagtccccaataa

SEQ ID NO: 5241 - DNA, 242 bp, Homo sapiens
cctctattggctctcggccttggcaacggccgtcgtcatggttactggcccctaggcgccgatggccgaggccgcgcctgcccaccgggcggggtcgctggttggccgggcccaggcgcgcggggacgcggaggccgcgcatcctttcccagctccccaccctccttgcctttgggtgcgcgacaaacaatcgctccgggctcagggctgcgcggctcttcccttcattccatgggcctttt

SEQ ID NO: 5242 - DNA, 501 bp, Homo sapiens
  misc_feature (31)..(31): n includes a, c, g, or t, or contains no nucleotide
  misc_feature (40)..(40): n includes a, c, g, or t, or contains no nucleotide
  misc_feature (64)..(64): n includes a, c, g, or t, or contains no nucleotide
  misc_feature (74)..(74): n includes a, c, g, or t, or contains no nucleotide
  misc_feature (84)..(85): n includes a, c, g, or t, or contains no nucleotide
  misc_feature (100)..(100): n includes a, c, g, or t, or contains no nucleotide
  misc_feature (105)..(105): n includes a, c, g, or t, or contains no nucleotide
  misc_feature (114)..(114): n includes a, c, g, or t, or contains no nucleotide
  misc_feature (128)..(128): n includes a, c, g, or t, or contains no nucleotide
  misc_feature (138)..(138): n includes a, c, g, or t, or contains no nucleotide
  misc_feature (161)..(161): n includes a, c, g, or t, or contains no nucleotide
  misc_feature (168)..(168): n includes a, c, g, or t, or contains no nucleotide
  misc_feature (201)..(201): n includes a, c, g, or t, or contains no nucleotide
  misc_feature (210)..(210): n includes a, c, g, or t, or contains no nucleotide
  misc_feature (446)..(448): n includes a, c, g, or t, or contains no nucleotide
atgcaggctactccatgtttggggctggccntcaccgtanggcctgtctaacctcttctgtggnagtctgcgtngggcatcgtnngggcagtggggctgnccctnggccgatgnctcagaaccccagncctctttgtnaaagattctcatcgtggagatcntttggcnagcgccattggcctctttggggtcatcgtcgcnaattcttcnagacctccagagtgaagatgggtgactagatgatatgtgtgggtggggccgtgcctcacttttatttattgctggttttcctgggacagctggagctgtgtcccttagcctttcagaggcttggtgttcagggccctccctgcactcccctcttgctgcgtgttgatttggaggcactgcagtccaggccgagtcctcagtgcggggagcaggctgctgctgctgactctgtgcannngcgcacctgtgtcccccacctccaccctcaacccatcttcctagtgtttgtga

SEQ ID NO: 5243 - DNA, 565 bp, Homo sapiens
ccctgtctgactacaacattcagaaagagtccaccctgcacctggtgctccgtctcagaggtgggatgcaaatcttcgtgaagacactcactggcaagaccatcacccttgaggtggagcccagtgacaccatcgagaacgtcaaggcaaagatccaggacaaggaaggcattcctcctgaccagcagaggttgatctttgccggaaagcagctggaagatgggcggaccctgtctgactacaacatccagaaagagtctaccctgcacctggtgctccgtctcagaggtgggatgcagatcttcgtgaagaccctgactggtaagaccattaccctcgaggtggagcccagtgacaccatcgagaatgtcaaggcaaagatccaagataaggaaggcatccctcctgatcagcagaggttgatctttgctgggaaacagctggaagatggacgcaccctgtctgactacaacatccagaaagagtccactctgcacttggtcctgcgcttgagggggggtgtctaagtttccccttttaaggtttcaacaaatttcattgcact

SEQ ID NO: 5244 - DNA, 481 bp, Homo sapiens
  misc_feature (372)..(386): n includes a, c, g, or t, or contains no nucleotide
tacacacgtttgtttcttcgtgcctgttttatgtgcacacattaggcattgagacttcaagcttttctttttttgtccacgtatctttgggtctttgataaagaaaagaatccctgttcattgtaagcacttttacggggcgggtggggaggggtgctctgctggtcttcaattaccaagaattctccaaaacaattttctgcaggatgattgtacagaatcattgcttatgacatgatcgctttctacactgtattacataaataaattaaataaaataaccccgggcaagacttttctttgaaggatgactacagacattaaataatcgaagtaattttgggtggggagaagaggcagattcaattttcnnnnnnnnnnnnnnngtttcatttatgatacaaaagaagatgaaaatggaagtggcaatataaggggatgaggaaggcatgcctggacaaacccttcttttaagatgtgt

SEQ ID NO: 5245 - DNA, 426 bp, Homo sapiens
  misc_feature (84)..(84): n includes a, c, g, or t, or contains no nucleotide
  misc_feature (131)..(131): n includes a, c, g, or t, or contains no nucleotide
  misc_feature (134)..(134): n includes a, c, g, or t, or contains no nucleotide
  misc_feature (148)..(148): n includes a, c, g, or t, or contains no nucleotide
  misc_feature (197)..(197): n includes a, c, g, or t, or contains no nucleotide
  misc_feature (205)..(297): n includes a, c, g, or t, or contains no nucleotide
acaattctgggcacggtgaagcccaatgcaaacagaattgctttagatttccaaagagggaatgatgttgccttccactttaancccacgcttcaatgagaacaacaggagagtcattgtttgcaatacanaangctggataataacntggggaagggaagaaagacagtcggttttcccatttgaaagtgggaaanccattcannnnnnnnnnnnnnnnnnnnnnnnnnnnnnnnnnnnnnnnnnnnnnnnnnnnnnnnnnnnnnnnnnnnnnnnnnnnnnnnnnnnnnnnnnnnngaaatcagcaaactgggaatttctggtgacatagacctcaccagtgcttcatataccatgatataatctgaaaggggcagattaaaaaaaaaaaaagaatctaaaccttacatgtgtaaaggtttcatg

SEQ ID NO: 5246 - DNA, 385 bp, Homo sapiens
  misc_feature (185)..(221): n includes a, c, g, or t, or contains no nucleotide
caacactgaatactgtagaaatgcactttgctcagtaatacttgagttgttgcaatatttgattatccatttggttgttacagaaaaattcttaactgtaattgatggttgttgccgtaatagtatattgcctgtatttctacctctagtaatgggctttatgtgctagattttaatatccttgnnnnnnnnnnnnnnnnnnnnnnnnnnnnnnnnnnnnntggtttacttgcacaaaactgatcagttttgagagatcgttaatgcccttgaagtggtttttgtgggtgtgaaacaaatggtgagaatttgaattggtccctcctattatagtattgaaattaagtctacttaatttatcaagtcatgttcatgccctgatttt

SEQ ID NO: 5247 - DNA, 165 bp, Homo sapiens
tacccaccaaacagaacgaggaattccgccccttcattcgaaggctcccagagtttaaattttggcatgcggctaccaagggcatccttgtggctatggtctgtactttcttcgacgctttcaacgtcccggtgttctggccgattctggtgatgtacttcatca

SEQ ID NO: 5248 - DNA, 170 bp, Homo sapiens
gaccatgtcgtctggtccctgttcaacaccctcttcttgaactggtgctgtctgggcttcatagcattcgcctactccgtgaagtctagggacaggaagatggttggcgacgtgaccggggcccaggcctatgcctccaccgccaagtgcctgaacatctgggccctgat

SEQ ID NO: 5249 - DNA, 330 bp, Homo sapiens
  misc_feature (33)..(63): n includes a, c, g, or t, or contains no nucleotide
  misc_feature (123)..(123): n includes a, c, g, or t, or contains no nucleotide
  misc_feature (144)..(144): n includes a, c, g, or t, or contains no nucleotide
gtgaccacgtgaccaacttgcgcaagatgggannnnnnnnnnnnnnnnnnnnnnnnnnnnnnnttgacaagcacaccctgggagacagtgataatgaaagctaagcctcgggctaatttcccnatagccgtggggtgacttccntggtcaccaaggcagtgcatgcatgttggggtttcctttaccttttctataagttgtaccaaaacatccacttaagttctttgatttgtaccattcttcaaataaagaaatttggtacccaggtgttgtctttgaggtcttggatgaatcagaaatctatccaggctatcttccagattccttaag

SEQ ID NO: 5250 - DNA, 542 bp, Homo sapiens
  misc_feature (109)..(109): n includes a, c, g, or t, or contains no nucleotide
  misc_feature (120)..(120): n includes a, c, g, or t, or contains no nucleotide
  misc_feature (171)..(171): n includes a, c, g, or t, or contains no nucleotide
  misc_feature (173)..(173): n includes a, c, g, or t, or contains no nucleotide
  misc_feature (451)..(451): n includes a, c, g, or t, or contains no nucleotide
  misc_feature (458)..(459): n includes a, c, g, or t, or contains no nucleotide
agccggaattctgtgttgaacagatgtctgtctccctagtgtgtgactcacaccttgtggctgccttcagagcgccacctccagatcagatggggacacacaacccctnggatatgtttncattgtcagattttgtgcttgattttaagaatggaattgtgggtatctttncntttttttttaatgtatcttaactgttgcctgtcagtgtttacaaactagtgcgttgacggcaccgtgtccaagtttttagaacccttgttagccagaccgaggtgtcctggtcaccgtttcaccatcatgctttgatgttcccctgtctttccctcttctgctctcaagagcaaaggttaatttaaggacaaagatgaagtcactgtaaactaatctgtcattgtttttaccttccttttctttttcagtgcagaaattaaaagtaagtataaagcanccgtganngggagtgtttttgcgtgtgtcggaatcactggtaaatgttggctgagaacaatccctccccttgcacttgtgaaaacactttg

SEQ ID NO: 5251 - DNA, 449 bp, Homo sapiens
  misc_feature (142)..(142): n includes a, c, g, or t, or contains no nucleotide
  misc_feature (144)..(229): n includes a, c, g, or t, or contains no nucleotide
  misc_feature (303)..(303): n includes a, c, g, or t, or contains no nucleotide
  misc_feature (366)..(366): n includes a, c, g, or t, or contains no nucleotide
  misc_feature (392)..(394): n includes a, c, g, or t, or contains no nucleotide
cggacgttctttctagctgagatttttatttttccacatctgtagtgccatgaagcgattctgtctttgacttccaatggcaaacctgggtgatcgggaacaagcacgttgtacccttggctggacatggccaagacacaangnnnnnnnnnnnnnnnnnnnnnnnnnnnnnnnnnnnnnnnnnnnnnnnnnnnnnnnnnnnnnnnnnnnnnnnnnnnnnnnnnnnnnncccatagggactgcgactgggaccaggtcaaccacgccaggggggtgtcaccagccttttctttttttctttcntttttttttttttcctccttaagctgctgtcaatccaaaccattggcatcatcgtttcttttnaattaaaaccaacatatcagcaatannntgctctccccgggaatctctaacatgctctgtttacatcgataaatgcacttaag

SEQ ID NO: 5252 - DNA, 447 bp, Homo sapiens
  misc_feature (26)..(66): n includes a, c, g, or t, or contains no nucleotide
  misc_feature (306)..(329): n includes a, c, g, or t, or contains no nucleotide
agagccaccggaatgccaacgcagannnnnnnnnnnnnnnnnnnnnnnnnnnnnnnnnnnnnnnnntcggcagaaacagcccaggcgttggcagcagggttagaacagctgcctgaggctcctccctgaaggacacctgcctgagagcagagatggaggccttctgttcacggcggattctttgttttaatcttgcgatgtgctttgcttgttgctgggcggatgatgtttactaacgatgaattttacatccaaagggggataggcacttggacccccattctccaaggcccgggggggcggttnnnnnnnnnnnnnnnnnnnnnnnncattattaagtccctgtaactcaaatgtcaaccccaccgaggcacccccccgtcccccagaatcttggctgtttacaaatcacgtgtccatcgagcacgtctgaaacccctggtagcc

SEQ ID NO: 5253 - DNA, 435 bp, Homo sapiens
gggaaagtcgctacatggatcaatgggttccagtgattaatctccctgaacggtgatggcatctgaatgaaaataactgaaccaaattgcactgaagtttttgaaatacctttgtagttactcaagcagttactccctacactgatgcaaggattacagaaactgatgccaaggggctgagtgagttcaactacatgttctgggggcccggagatagatgactttgcagatggaaagaggtgaaaatgaagaaggaagctgtgttgaaacagaaaaataagtcaaaaggaacaaaaattacaaagaaccatgcaggaaggaaaactatgtattaatttagaatggttgagttacattaaaataaaccaaatatgttaaagtttaagtgtgcagccatagtttgggtatttttggtttatatgccctcaagtaaaa

SEQ ID NO: 5254 - DNA, 187 bp, Homo sapiens
  misc_feature (86)..(97): n includes a, c, g, or t, or contains no nucleotide
tatgcaaatctttgacggggttttccttgtcctgccaggattaaaagccatgagtttcttgtcaaaaaaaaaaaaaaaaaaaaaannnnnnnnnnnnagggagccggaagcagctgctctgcctgcagacatccgtgtgaccttgtagactttggaggggggccgccaaagggctgatccacagcgg

SEQ ID NO: 5255 - DNA, 456 bp, Homo sapiens
  misc_feature (104)..(104): n includes a, c, g, or t, or contains no nucleotide
  misc_feature (122)..(122): n includes a, c, g, or t, or contains no nucleotide
  misc_feature (144)..(144): n includes a, c, g, or t, or contains no nucleotide
  misc_feature (148)..(148): n includes a, c, g, or t, or contains no nucleotide
  misc_feature (284)..(284): n includes a, c, g, or t, or contains no nucleotide
  misc_feature (292)..(292): n includes a, c, g, or t, or contains no nucleotide
ggtgaagaccctagcgtccagctcccctcaacgctatattttgacactaaaaaagaaggtttctaaattgtaggagcaggatggaaatactttgctgcccttgnccatcttttaggatgggncccccaggagactgaggtcttncctngggccctcattgctgcttatcgtaccccccatcacctgcacatgggacagaccgggctggagggtgaccttggctgtgtacgtcccagcaaaagagctctggcccgcatctcgctgtgccctgaagggggatgaanggcgatgncctcgcccgaggctttgggctgctgcactgcatgctgggactgctcctactctctgtcccacccctcacccagctgtggtccggctttgggagagtggtgaattgcgctgcccgaactcggagcggagcagggtagggaccgtgtacagcttgataacccttaa

SEQ ID NO: 5256 - DNA, 367 bp, Homo sapiens
ctctaaggcctatattcacacacgtatgcgggcgaaaacgtctgacttcctcaaggtgctgaaccgcgcacgcccagatgccgagaaaaaagaaatgaaaacaatcacggggaagacgttttcatcccgctaatcttgggaataagaggaggaagcggctggcaactgaaggctggaacacttgctactgataatcgtagcttttaatgttgcgcctcttcaggttcttaaggattctccgttttggttccattttgtacacgtttggaaaataatctgcagaaacgagctgtgcttgcaaagacttcatagttcccaagaattaaaaaaaaaaaaaaaaaaagaattccacttgatcaacttaatt

SEQ ID NO: 5257 - DNA, 520 bp, Homo sapiens
  misc_feature (27)..(27): n includes a, c, g, or t, or contains no nucleotide
  misc_feature (30)..(31): n includes a, c, g, or t, or contains no nucleotide
  misc_feature (38)..(38): n includes a, c, g, or t, or contains no nucleotide
  misc_feature (66)..(66): n includes a, c, g, or t, or contains no nucleotide
  misc_feature (143)..(143): n includes a, c, g, or t, or contains no nucleotide
  misc_feature (174)..(174): n includes a, c, g, or t, or contains no nucleotide
  misc_feature (235)..(269): n includes a, c, g, or t, or contains no nucleotide
  misc_feature (273)..(273): n includes a, c, g, or t, or contains no nucleotide
  misc_feature (300)..(301): n includes a, c, g, or t, or contains no nucleotide
  misc_feature (409)..(409): n includes a, c, g, or t, or contains no nucleotide
tcacctctgaggtgcctgctggcatcnctnncccccantgcttactaatacattcccttccccatnagccatcaaaactggaccaactggcctcttcctttcccctgggaccaaaatttaggggcctcagtccctcaccgccnatgccctggcctattctgtctctccttcttnccccctggcctgttctgtctctgagctctgtgtcctccgttcattccatggctgggagtcnnnnnnnnnnnnnnnnnnnnnnnnnnnnnnnnnnnactnggccttgcttctacaagtatgcttctnncccacagctgtggctgcaggaacttaatttatagggaggagcctgtggcagctgctgccccagccacagctgcactgactgtgctcaccacacatctggggcagcctntccctggcaggggccctcgtggcttctcattttccattcccttcactgtggctaaggggtggggtgaggggatggagagggagggctgcctaccatggtctggggcttgag

SEQ ID NO: 5258 - DNA, 440 bp, Homo sapiens
  misc_feature (107)..(107): n includes a, c, g, or t, or contains no nucleotide
  misc_feature (118)..(118): n includes a, c, g, or t, or contains no nucleotide
  misc_feature (237)..(253): n includes a, c, g, or t, or contains no nucleotide
ttgacaccagaaagccctcttgggggcactgctccctaccccagggccctggccagccgggagcttggctctcctctggctagagtgggaagagggggctggccatnggggccctccnagaacctcagcatttccttccagcccatccaaacactgaggcagccttggggaaccccgagctggggggttggcagcccactgcaccgcctcagggttttggggtcctgggctggggcnnnnnnnnnnnnnnnnngaactcccacaaccacatgtatttattcctctgtcctaaaccgtcccctccttccctcacccccagcacagggggattctgagcagtgcctcttgtctgagggacatatcagtgacctcgacgttgcctttagactacagttgtgttagcctcttgcgtattggctttttcagagtcatttatgagc

SEQ ID NO: 5259 - DNA, 458 bp, Homo sapiens
  misc_feature (41)..(41): n includes a, c, g, or t, or contains no nucleotide
  misc_feature (44)..(58): n includes a, c, g, or t, or contains no nucleotide
  misc_feature (61)..(61): n includes a, c, g, or t, or contains no nucleotide
  misc_feature (66)..(66): n includes a, c, g, or t, or contains no nucleotide
  misc_feature (79)..(80): n includes a, c, g, or t, or contains no nucleotide
  misc_feature (91)..(91): n includes a, c, g, or t, or contains no nucleotide
  misc_feature (97)..(97): n includes a, c, g, or t, or contains no nucleotide
  misc_feature (102)..(102): n includes a, c, g, or t, or contains no nucleotide
  misc_feature (106)..(106): n includes a, c, g, or t, or contains no nucleotide
  misc_feature (114)..(114): n includes a, c, g, or t, or contains no nucleotide
  misc_feature (350)..(370): n includes a, c, g, or t, or contains no nucleotide
catgttgttgccaccctgtgtgacttttgaagctgtaaaantgnnnnnnnnnnnnnnnggntggcngtcggggcagggnnccgccgaggcntggganggaancccnttctgccnttttgctggtgtttctggaatttgctttccctcacctctcacttccttctagaaggagcttcctgactggaaccagagaatgcatgtctgtccacttggtggctgctgggtggggccgggaacaagggcccctgaccctgtgtgctggccgggacctgccaccagccccccagcctgcttcttccccttaagctttgtgcccctggatgcgctaacattcactcttgtttgtcccnnnnnnnnnnnnnnnnnnnnnagatggttatttaaagagaattccctatttatttgacaaaaaatccagttaatatattaatgtgaaataaaccctgtttgcacctcga

SEQ ID NO: 5260 - DNA, 448 bp, Homo sapiens
  misc_feature (136)..(151): n includes a, c, g, or t, or contains no nucleotide
  misc_feature (170)..(170): n includes a, c, g, or t, or contains no nucleotide
  misc_feature (325)..(326): n includes a, c, g, or t, or contains no nucleotide
  misc_feature (332)..(332): n includes a, c, g, or t, or contains no nucleotide
  misc_feature (336)..(336): n includes a, c, g, or t, or contains no nucleotide
  misc_feature (341)..(341): n includes a, c, g, or t, or contains no nucleotide
  misc_feature (343)..(343): n includes a, c, g, or t, or contains no nucleotide
  misc_feature (348)..(352): n includes a, c, g, or t, or contains no nucleotide
  misc_feature (355)..(355): n includes a, c, g, or t, or contains no nucleotide
  misc_feature (358)..(365): n includes a, c, g, or t, or contains no nucleotide
  misc_feature (374)..(386): n includes a, c, g, or t, or contains no nucleotide
  misc_feature (389)..(389): n includes a, c, g, or t, or contains no nucleotide
  misc_feature (391)..(391): n includes a, c, g, or t, or contains no nucleotide
ttcacggacgccaaggagtccagcacggtgttcgaactgaagcgcatcgtcgagggcatcctcaagcggcctcctgacgagcagcggctgtacaaggatgaccaactcttggatgatggcaagacactgggcgagnnnnnnnnnnnnnnnnaaacagcacggccacaggncccagccacagtggggctggccttccgggcagatgacacctttgaggccctgtgcatcgagccgttttccagcccgccagagctgcccgatgtgatgaagccccaggactcgggaagcagtgccaatgaacaagccgtgcagtgagacccccaannggcccntttnccccnanaaaannnnnttnggnnnnnnnnaaaaaaaannnnnnnnnnnnnaanancagaaacacaagctggagccagtgtcctggtttgacagcatgttcaacgagggaacc

SEQ ID NO: 5261 - DNA, 462 bp, Homo sapiens
  misc_feature (399)..(414): n includes a, c, g, or t, or contains no nucleotide
tgagaaggctcctgacatgagcagctctgaggaatttcccagctttggggctcaggtggctcccaagaccctcccttggggccccaaacgataatgatcaaaaagaacagaaccctctccagcctgctgacccgaacccaaccacacaatggtttgtctcaatctgacccagcggctggaccctccgtaaattgttgagcgctcttccccttcccgaggtccgcagggagcctagcgcctggctgtgtgtgcggccgctcctccaggcctggccgtgcccgctcaggacctgctccactgtttaacaataaaccaaggtcatgagcattcgagctaagataacagactccagctcctggtccacccggcatgtcagtcagcactctggccttcatcacnnnnnnnnnnnnnnnntggctaggattccacttcctgtgtcatgacctcaggaaataaacgtcc

SEQ ID NO: 5262 - DNA, 505 bp, Homo sapiens
  misc_feature (61)..(61): n includes a, c, g, or t, or contains no nucleotide
  misc_feature (115)..(126): n includes a, c, g, or t, or contains no nucleotide
  misc_feature (128)..(130): n includes a, c, g, or t, or contains no nucleotide
  misc_feature (132)..(132): n includes a, c, g, or t, or contains no nucleotide
  misc_feature (135)..(135): n includes a, c, g, or t, or contains no nucleotide
  misc_feature (137)..(144): n includes a, c, g, or t, or contains no nucleotide
  misc_feature (146)..(147): n includes a, c, g, or t, or contains no nucleotide
  misc_feature (441)..(455): n includes a, c, g, or t, or contains no nucleotide
ctctttgcatttgtaaagctttggagatattgaatcatgttaccatttctgtttttttccnccctgttttcttccatatttactgaagctcagaagcagtattgggtctgcaacnnnnnnnnnnnnannntntcntnnnnnnnntnngataaaatgcaatacccaatttcaattaatgttaacccctgtatagaattgaaaggatccaaaggattattgcacattttctacattccaaggagagatttaaagcaattatatttcaatctctatataactgtcaacaccatgaatcttccaaagcgcaaagaagttatttgccgaggatctgatgacgattactctttttgcagagctctgaagggagagactgtgaatacaacaatatcattctccttcaagggaataaaattttctaagggaaaatacaaatgtgttgtnnnnnnnnnnnnnnngagcccagaagaaatgctcttttgcttggagtttgtcatcctacaccaac

SEQ ID NO: 5263 - DNA, 614 bp, Homo sapiens
  misc_feature (117)..(119): n includes a, c, g, or t, or contains no nucleotide
  misc_feature (121)..(124): n includes a, c, g, or t, or contains no nucleotide
  misc_feature (127)..(128): n includes a, c, g, or t, or contains no nucleotide
  misc_feature (130)..(131): n includes a, c, g, or t, or contains no nucleotide
  misc_feature (135)..(146): n includes a, c, g, or t, or contains no nucleotide
  misc_feature (148)..(173): n includes a, c, g, or t, or contains no nucleotide
  misc_feature (272)..(288): n includes a, c, g, or t, or contains no nucleotide
  misc_feature (417)..(433): n includes a, c, g, or t, or contains no nucleotide
  misc_feature (467)..(467): n includes a, c, g, or t, or contains no nucleotide
  misc_feature (469)..(558): n includes a, c, g, or t, or contains no nucleotide
cctgacccgtatagtgtgccacaggacctgggtcggtctagaactctctcaggatgccttttctaccccatccctcacagcctcttgctgctaaaatagatgtttcatttttctgannnannnnaannannaaannnnnnnnnnnnannnnnnnnnnnnnnnnnnnnnnnnnnaatcattcccctttgcctgtggctaagacttggcttcatttcgtcatgtaattgtatatttttatttggaggcatattttcttttcttacagtcattgnnnnnnnnnnnnnnnnnagtctgtttgctgcatacacatttctggtgagggcgactgggtgggtgaagcaccgtgtcctcgctgaggagagaaagggaggcgtgcctgagagggtagcctgtgcatctggtgagtgtgtcacgagnnnnnnnnnnnnnnnnntcactcctttttagaaaaaacaaaaaaaaagggncnnnnnnnnnnnnnnnnnnnnnnnnnnnnnnnnnnnnnnnnnnnnnnnnnnnnnnnnnnnnnnnnnnnnnnnnnnnnnnnnnnnnnnnnnngtgccttaaacctgaatgtctgtagccaaaacttgtttccacattaagagtcagcc

SEQ ID NO: 5264 - DNA, 437 bp, Homo sapiens
  misc_feature (68)..(68): n includes a, c, g, or t, or contains no nucleotide
  misc_feature (78)..(78): n includes a, c, g, or t, or contains no nucleotide
  misc_feature (87)..(87): n includes a, c, g, or t, or contains no nucleotide
  misc_feature (97)..(97): n includes a, c, g, or t, or contains no nucleotide
  misc_feature (103)..(179): n includes a, c, g, or t, or contains no nucleotide
  misc_feature (206)..(207): n includes a, c, g, or t, or contains no nucleotide
  misc_feature (209)..(209): n includes a, c, g, or t, or contains no nucleotide
  misc_feature (222)..(222): n includes a, c, g, or t, or contains no nucleotide
  misc_feature (229)..(229): n includes a, c, g, or t, or contains no nucleotide
  misc_feature (240)..(240): n includes a, c, g, or t, or contains no nucleotide
  misc_feature (258)..(258): n includes a, c, g, or t, or contains no nucleotide
  misc_feature (324)..(324): n includes a, c, g, or t, or contains no nucleotide
  misc_feature (343)..(343): n includes a, c, g, or t, or contains no nucleotide
  misc_feature (357)..(401): n includes a, c, g, or t, or contains no nucleotide
tgttcggtgatccgggactcactgctgcaggatggggaatttagcatggatcttcgtaccaagagcanccggtggggncccccaccnttcaatgtcnactgtnnnnnnnnnnnnnnnnnnnnnnnnnnnnnnnnnnnnnnnnnnnnnnnnnnnnnnnnnnnnnnnnnnnnnnnnnnnnntcaacaagaaatgttatgaaatggccnntncccaccttcggcngttcccnagtactgaccntcgtctgtcccttccccnttcaccgctccccacagctttgcacccctttcctccccatacacacacaaaccattttattttttngggccattaccccataccnccttattgctgccnnnnnnnnnnnnnnnnnnnnnnnnnnnnnnnnnnnnnnnnnnnnntccccctacccatatccctcccgtgtgtggttggaa

SEQ ID NO: 5265 - DNA, 447 bp, Homo sapiens
  misc_feature (176)..(176): n includes a, c, g, or t, or contains no nucleotide
  misc_feature (178)..(179): n includes a, c, g, or t, or contains no nucleotide
  misc_feature (184)..(185): n includes a, c, g, or t, or contains no nucleotide
  misc_feature (387)..(387): n includes a, c, g, or t, or contains no nucleotide
ggaaggcagctttcgcttgttcctgcctcgggacagccccgggtttccccagcatcctgatgtgtcccctctccccacttcagaggccacccactcagcaccaccggcctggccttgcctgcagactataaactataaccactagctcgacacagtctgcagtccaggcgtgtggnanncgccnncccggctcggggaggccccggggctgggaacgcctgtgccttcctgcgccgaagccaacgccccctctgtccttccctggccctgctgccgaccaggagctgcccagcctgtgggcggtcggccttccctccttcgctccttttttatattagtgattttaaaggggactcttcagggacttgtgtactggttatgggggtnccagaggcactaggcttggggtggggaggtcccgtgttccatatagaggaaccccaaata

SEQ ID NO: 5266 - DNA, 567 bp, Homo sapiens
  misc_feature (400)..(414): n includes a, c, g, or t, or contains no nucleotide
  misc_feature (462)..(529): n includes a, c, g, or t, or contains no nucleotide
tagctgaggcagaggatgagccactgcttacctgaggggacctgggggctctactgaggcctctcccctgggggctctactcatagtggcacaaccttttagaggtgggtcagcctcccctccaccacttccttccctgtccctggatttcagggacttggtgggcctcccgttgaccctatgtagctgctataaagttaagtgtccctcaggcagggagagggctcacagagtctcctctgtacgtggccatggccagacaccccagtcccttcaccaccacctgctccccacgccaccaccatttgggtggctgtttttaaaaagtaaagttcttagaggatcataggtctggacactccatccttgccaaacctctacccaaaagtggccttaagcnnnnnnnnnnnnnnnaactagagaccctccagcccccaaggggaggatttgggcagaacctgnnnnnnnnnnnnnnnnnnnnnnnnnnnnnnnnnnnnnnnnnnnnnnnnnnnnnnnnnnnnnnnnnnnntccatagctacggcattgctcagtaagttgaggtcaaa

SEQ ID NO: 5267 - DNA, 438 bp, Homo sapiens
  misc_feature (143)..(157): n includes a, c, g, or t, or contains no nucleotide
  misc_feature (315)..(360): n includes a, c, g, or t, or contains no nucleotide
  misc_feature (367)..(367): n includes a, c, g, or t, or contains no nucleotide
  misc_feature (373)..(373): n includes a, c, g, or t, or contains no nucleotide
  misc_feature (376)..(376): n includes a, c, g, or t, or contains no nucleotide
  misc_feature (399)..(399): n includes a, c, g, or t, or contains no nucleotide
ctcaaagactaaaattcttgtgtgaacgcaatgacaaggtgttctttgcctctgttcggtctggtggcagcagtcaggtttatttcatgaccttaggcaggacttctcttctgagctggtagaagcagtgtgatccagggatnnnnnnnnnnnnnnntcttcaagatcctgagaacttggaattccttgtaactggagctcggagctgcaccgagggcaaccaggacagctgtgtgtgcagacctcatgtgttgggttctctcccctccttcctgttcctcttatataccagtttatccccattctttttttttnnnnnnnnnnnnnnnnnnnnnnnnnnnnnnnnnnnnnnnnnnnnnncagattntaaaanaanaagatgcaggtttaagaagttanatatttataaaatgtgaaagacacagttactaggataac

SEQ ID NO: 5268 - DNA, 149 bp, Homo sapiens
accccacaagccatggagactcaggaccccagaaggcatggaagctgcctccagtagacatcactgaaccccagccagcccagacccctgacacagaccactagaagattccgggaacgttgggagtcacctgattctgcaaagataaa

SEQ ID NO: 5269 - DNA, 577 bp, Homo sapiens
tcagatgctgccagagagtgaggatgaggagagctatgacacagagtcagagttcacggagttcacagaggacgagctgccctatgatgactgtgtgtttggaggccagcgtctgacgttatgagtgcaaaggggctgaaagaacatggacttgtatatttgtacaaaaaaaaagttttatttttctaaaaaaagaaaaaagaagaaaaaatttaaagggtgtacttatatccacactgcacactgcctagcccaaaacgtcttattgtggtaggatcagccctcattttgttgcttttgtgaactttttgtaggggacgagaaagatcattgaaattctgagaaaacttcttttaaacctcacctttgtggggtttttggagaaggttatcaaaaatttcatggaaggaccacattttatatttattgtgcttcgagtgactgaccccagtggtatcctgtgacatgtaacagccaggagtgttaagcgttcagtgatgtggggtgaaaagttactacctgtcaaggtttgtgttaccctcctgtaaatggtgtacataatgtattgttggtaatt

SEQ ID NO: 5270 - DNA, 438 bp, Homo sapiens
  misc_feature (66)..(66): n includes a, c, g, or t, or contains no nucleotide
  misc_feature (291)..(291): n includes a, c, g, or t, or contains no nucleotide
  misc_feature (294)..(294): n includes a, c, g, or t, or contains no nucleotide
  misc_feature (297)..(297): n includes a, c, g, or t, or contains no nucleotide
  misc_feature (348)..(348): n includes a, c, g, or t, or contains no nucleotide
agtagactgcagcaaagcaggcaacaacatgctgctggtgggggttcatggcccaaggaccccctngcgaggagatcctggtgaagcacgtgggcagccggctctacagcgtgtcctacctgctcaaggacaagggggagtacacactggtggtcaaatggggggacgagcacatcccaggcagcccctaccgcgttgtggtgccctgagtctggggcccgtgccagccggcagcccccaagcctgccccgctacccaagcagccccgccctcttcccctcaaccccggcnccnggnccgccctggccgcccgcctgtcactgcagccgcccctgccctgtgccgtgntgcgctcacctgcctccccagccagccgctgacctctcggctttcacttgggcagagggagccatttggtggcgctgcttgtcttctttg

SEQ ID NO: 5271 - DNA, 516 bp, Homo sapiens
  misc_feature (155)..(155): n includes a, c, g, or t, or contains no nucleotide
  misc_feature (157)..(157): n includes a, c, g, or t, or contains no nucleotide
aggcgatcttgtgtctactctaggactgggcccgagggtggtttacctgcaccgttgactcagtatagtttaaaaatctgccacctgcacaggtatttttgaaagcaaaataaggttttcttttttcccctttcttgtaataaatgataaaattncngagtctttctcactgcctttgtttagaagagagtagctcgtcctcactggtctacactggttgccgaatttacttgtattcctaactgttttgtatatgctgcattgagacttacggcaagaaggcattttttttttttaaaggaaacaaactctcaaatcatgaagtgatataaaagctgcatatgcctacaaagctctgaattcaggtcccagttgctgtcacaaaggagtgagtgaaactcccaccctacccccttttttatataataaaagtgccttagcatgtgttgcagctgtcaccactacagtaagctggtttacagatgttttccactgagcatcacaataaagagaacc

SEQ ID NO: 5272 - DNA, 447 bp, Homo sapiens
  misc_feature (141)..(214): n includes a, c, g, or t, or contains no nucleotide
  misc_feature (248)..(265): n includes a, c, g, or t, or contains no nucleotide
  misc_feature (382)..(407): n includes a, c, g, or t, or contains no nucleotide
ctccctgagggagcatggcacagcctcacacttgaaagacggtgtttggtttcccatctaatcaacttaagggaagccggcatgtacccttcaaggccctgtcaccacctatttcctgatcagttggtataaactgagggnnnnnnnnnnnnnnnnnnnnnnnnnnnnnnnnnnnnnnnnnnnnnnnnnnnnnnnnnnnnnnnnnnnnnnnnnntttcggagcagcacccaggaggggatgccgcgcnnnnnnnnnnnnnnnnnnaggcctgtgcagacccctgccctgccgctgcagaaatccagaagcatccttaatgcttctcagtcttcagccagagggagggctgttatttccagaggtgcgctttttatgtacttnnnnnnnnnnnnnnnnnnnnnnnnnnagctttagatcattaaatccaaaatgtttgcctaaatgag

SEQ ID NO: 5273 - DNA, 373 bp, Homo sapiens
  misc_feature (32)..(32): n includes a, c, g, or t, or contains no nucleotide
  misc_feature (38)..(38): n includes a, c, g, or t, or contains no nucleotide
gggaagcccctgaatgtgacagtgatccgcangggggnaaaacaccagcttagacttgttccaacacgctgggcaggaaaaggactgctgggctgcaacattattcctctgcaaagatgattgtccctggggaacagtaacaggaaagcatcttcccttgccctggacttgggtctagggatttccaacttgtcttctctccctgaagcataaggatctggaagaggcttgtaacctgaacttctgtgtggtggcagtactgtggcccaccagtgtaatctccctggattaaggcattcttaaaaacttaggcttggcctctttcacaaattaggccacggccctaaataggaattccctggattgtgggcaa

SEQ ID NO: 5274 - DNA, 470 bp, Homo sapiens
  misc_feature (34)..(34): n includes a, c, g, or t, or contains no nucleotide
  misc_feature (46)..(48): n includes a, c, g, or t, or contains no nucleotide
  misc_feature (51)..(53): n includes a, c, g, or t, or contains no nucleotide
  misc_feature (55)..(55): n includes a, c, g, or t, or contains no nucleotide
  misc_feature (129)..(129): n includes a, c, g, or t, or contains no nucleotide
  misc_feature (155)..(155): n includes a, c, g, or t, or contains no nucleotide
  misc_feature (175)..(175): n includes a, c, g, or t, or contains no nucleotide
  misc_feature (181)..(181): n includes a, c, g, or t, or contains no nucleotide
  misc_feature (193)..(193): n includes a, c, g, or t, or contains no nucleotide
  misc_feature (202)..(202): n includes a, c, g, or t, or contains no nucleotide
  misc_feature (225)..(225): n includes a, c, g, or t, or contains no nucleotide
  misc_feature (230)..(230): n includes a, c, g, or t, or contains no nucleotide
  misc_feature (270)..(270): n includes a, c, g, or t, or contains no nucleotide
  misc_feature (277)..(278): n includes a, c, g, or t, or contains no nucleotide
  misc_feature (283)..(283): n includes a, c, g, or t, or contains no nucleotide
  misc_feature (293)..(293): n includes a, c, g, or t, or contains no nucleotide
  misc_feature (295)..(295): n includes a, c, g, or t, or contains no nucleotide
  misc_feature (314)..(314): n includes a, c, g, or t, or contains no nucleotide
  misc_feature (322)..(322): n includes a, c, g, or t, or contains no nucleotide
  misc_feature (325)..(325): n includes a, c, g, or t, or contains no nucleotide
  misc_feature (351)..(395): n includes a, c, g, or t, or contains no nucleotide
ggccgcagtggcatttatgaaactcgctgctagntgccactaggcnnntannncnacctccccagccaccctcctccacaggtccaggtgccgctccctcccccaccacacatcagtgtctcctccctncctgctttgctgccttccctttgcanccagcccgagtctaggtctngggccnaagcacattacnaagtggganccggtggagcagcccctgggctnccctngggcaggggagttctgaggctcctgctctcccatccaccntgtctgnntcctnggcctaatgncncaggctctgagttctgtgnaccaaagnccnaggtgggttccctttccttcccaccnnnnnnnnnnnnnnnnnnnnnnnnnnnnnnnnnnnnnnnnnnnnntcagagctcccccaaaggccagtaatggatccccggcctcagtccctactctgctttgggatagtgtgagcttca

SEQ ID NO: 5275 - DNA, 529 bp, Homo sapiens
gtgtggccatcgctgcagacaggcgcttcgggatccaggcccagttggtgaccacggacttccagaagatctttcccatgggtgaccggctgtacatcggtctggccgggctcgccactgacgtccagacagttgcccagcgcctcaagttccggctgaacctgtatgagttgaaggaaggtcggcagatcaaaccttataccctcatgagcatggtggccaacctcttgtatgagaaacggtttggcccttactacactgagccagtcattgccgggttggacccgaagacctttaagcccttcatttgctctctagacctcatcggctgccccatggtgactgatgactttgtggtcagtggcacctgcgccgaacaaatgtacggaatgtgtgagtccctctgggagcccaacatggatccggatcacctgtttgaaaccatctcccaagccatgctgaatgctgtggaccgggatgcagtgtcaggcatgggagtcattgtccacatcatcgagaaggacaaaat

SEQ ID NO: 5276 - DNA, 589 bp, Homo sapiens
acgtgcagatgctgcaggacgccatcagcaagatggaccccaccgacgcaaagtaccacatgcagcgctgcattgactctggcctctgggtccccaactctaaggccagcgaggccaaggagggagaggaggcaggtcctggggacccattactggaagctgttcccaagacgggcgatgagaaggatgtcagtgtgtgacctgccccagctaccaccgccacctgcttccagcccctatgtgccccttttcagaaaacagatagatgccatctcgcccgctcctgacttcctctacttgcgctgctcggcccagcctgggggcccgcccagccctccctggcctctccactgtctccactctccagcgcccattcaagtctctgctttgagtcaaggggcttcactgcctgcagccccccatcagcattatgccaaaggccgggggtccggaagggcagaggtcaccaggctggtctaccaggtagttggggagggtccccagccaaggggccggctctcgtcactgggctctgttttcactgttcgtctgctgtctgtgtcttctatttggcaaacagcaatgatct

SEQ ID NO: 5277 - DNA, 420 bp, Homo sapiens
  misc_feature (378)..(378): n includes a, c, g, or t, or contains no nucleotide
gggcctgtgatatttgctctcctgaactctcactcaatcctcttcctctcctctgtggcttttcctgttattgtcccctaatgataggatattccctgctgcctacctggagattcagtaggatcttttgagtggaggtgggtagagagagcaaggagggcaggacacttagcaggcactgagcaagcaggcccccacctgcccttagtgatgtttggagtcgttttaccctcttctattgaattgccttgggatttccttctccctttccctgcccaccctgtcccctacaatttgtgcttctgagttgaggagccttcacctctgttgctgaggaaatggtagaatgctgcctatcacctccagcacaatcccagngaaaaaggtgtgaagcacccaccatgttcttgaacaatcagg

SEQ ID NO: 5278 - DNA, 541 bp, Homo sapiens
cgaccggagcggtaggagcagcaatttatccgtgtgcagccccaaactggaaagaagatgctaattaaagtgaagacgctgaccggaaaggagattgagattgacattgaacctacagacaaggtggagcgaatcaaggagcgtgtggaggagaaagagggaatccccccacaacagcagaggctcatctacagtggcaagcagatgaatgatgagaagacagcagctgattacaagattttaggtggttcagtccttcacctggtgttggctctgagaggaggaggtggtcttaggcagtgatggaccctccattttacctctttaccctgtcgctcataatgaggcatcatatatcctctcactctctgggacaccatagccactgccccctcccctggatgcccagtaatgtatgtctactggtgggagactgtgaggatcccaggattcagtattcctggcccagagggccttgctggctactgggtgttagtttgcagtcctgtgtgcttccctctcttatgactgtgtccctggt

SEQ ID NO: 5279 - DNA, 45 bp, Homo sapiens
gcccgcgtctcgaaggggcacctgtgaactcaaaaggctcttttc

SEQ ID NO: 5280 - DNA, 527 bp, Homo sapiens
  misc_feature (26)..(36): n includes a, c, g, or t, or contains no nucleotide
  misc_feature (38)..(38): n includes a, c, g, or t, or contains no nucleotide
  misc_feature (40)..(40): n includes a, c, g, or t, or contains no nucleotide
  misc_feature (129)..(129): n includes a, c, g, or t, or contains no nucleotide
  misc_feature (139)..(139): n includes a, c, g, or t, or contains no nucleotide
  misc_feature (206)..(206): n includes a, c, g, or t, or contains no nucleotide
  misc_feature (264)..(264): n includes a, c, g, or t, or contains no nucleotide
caactgcagacaatgcctgttgatgnnnnnnnnnnnancngaaactttgtcatcggaaaaacttttcttgtatgcatgagactcaacatcaggatccacagcttaaagatgggaattcaggtatgaaangaaaacaggncaaggaggcactgagggagaaagacacagactttatcgctctgtggctcattgttactggaatattnctaaaactcttgttcacatgctattatgacttataaagcagcaacagctgaggcgcanccaggacacagcttccatttctttaacgtctgttcccttaacatcgctgaaatgatttactgttgaagagatgccttgcggtgtggccagctgtgaggagaaagcagctggcagtgttaggacattagtccaccttcagcgcagggtctctggccgggtctgactcagaaaccttggtactcgccccttggccacagtgcccagacccatgtaacccactggctcctgcattaacccagaaatacctcgcttctatctgtgca

SEQ ID NO: 5281 - DNA, 106 bp, Homo sapiens
ttcctgtctagtctctcctgtaagccaaagaaatgaacattccaaggagttggaagtgaagtctatgatgtgaaacactttgcctcctgtgtactgtgtcataaac

SEQ ID NO: 5282 - DNA, 556 bp, Homo sapiens
  misc_feature (26)..(44): n includes a, c, g, or t, or contains no nucleotide
  misc_feature (275)..(289): n includes a, c, g, or t, or contains no nucleotide
  misc_feature (352)..(385): n includes a, c, g, or t, or contains no nucleotide
gatggagcctgaaccgtgtgctcctnnnnnnnnnnnnnnnnnnntacttccctccaagaggctggaaaagggctcagagctgctgagcaggaaccggagggtgacccatttcaggaggtgccggtaccagcctgactaggtacaggcaagcttgtgtgggcccaacaggcccttggtagagctggtgccagatgtgggctcagatcctgggcatgatgggccgagccacctcggatcccactgattggccagccgagcgagaaccaggctgctgnnnnnnnnnnnnnnncgcttccagcttcctctgagccgcagggcctgctacgcgggcaagcgtgctgcctctcttctnnnnnnnnnnnnnnnnnnnnnnnnnnnnnnnnnncttaaccgtggactcttcctttatcccctcctttaccccacatatgcaatgacttttaattttcacttttgtagtttaatcctttgtattacaacatgaaatatagttgcatatatggacaccgacttgggaggacaggtcctgaatgtcctttctccagtgtaacatgtt

SEQ ID NO: 5283 - DNA, 388 bp, Homo sapiens
  misc_feature (118)..(133): n includes a, c, g, or t, or contains no nucleotide
gagcgtctcctgaagatgcaaaaccagcgtggcggccgcgctctcttccaggacatcaagaagccagctgaagatgagtggggtaaaaccccagacgccatgaaagctgccatggccnnnnnnnnnnnnnnnnaccaggcccttttggatcttcatgccctgggttctgcccgcacggacccccatctctgtgacttcctggagactcacttcctagatgaggaagtgaagcttatcaagaagatgggtgaccacctgaccaacctccacaggctgggtggcccggaggctgggctgggcgagtatctcttcgaaaggctcactctcaagcacgactaagagccttctgagcccagcgacttctgaagggccccttgcaaagtaatag

SEQ ID NO: 5284 - DNA, 510 bp, Homo sapiens
  misc_feature (53)..(53): n includes a, c, g, or t, or contains no nucleotide
  misc_feature (193)..(193): n includes a, c, g, or t, or contains no nucleotide
  misc_feature (199)..(204): n includes a, c, g, or t, or contains no nucleotide
  misc_feature (206)..(206): n includes a, c, g, or t, or contains no nucleotide
  misc_feature (208)..(208): n includes a, c, g, or t, or contains no nucleotide
  misc_feature (210)..(210): n includes a, c, g, or t, or contains no nucleotide
  misc_feature (238)..(238): n includes a, c, g, or t, or contains no nucleotide
  misc_feature (248)..(248): n includes a, c, g, or t, or contains no nucleotide
  misc_feature (280)..(280): n includes a, c, g, or t, or contains no nucleotide
  misc_feature (291)..(291): n includes a, c, g, or t, or contains no nucleotide
  misc_feature (293)..(293): n includes a, c, g, or t, or contains no nucleotide
  misc_feature (311)..(311): n includes a, c, g, or t, or contains no nucleotide
  misc_feature (320)..(320): n includes a, c, g, or t, or contains no nucleotide
  misc_feature (325)..(326): n includes a, c, g, or t, or contains no nucleotide
  misc_feature (330)..(330): n includes a, c, g, or t, or contains no nucleotide
  misc_feature (332)..(332): n includes a, c, g, or t, or contains no nucleotide
  misc_feature (348)..(396): n includes a, c, g, or t, or contains no nucleotide
  misc_feature (403)..(405): n includes a, c, g, or t, or contains no nucleotide
  misc_feature (407)..(407): n includes a, c, g, or t, or contains no nucleotide
  misc_feature (410)..(410): n includes a, c, g, or t, or contains no nucleotide
  misc_feature (413)..(413): n includes a, c, g, or t, or contains no nucleotide
  misc_feature (417)..(417): n includes a, c, g, or t, or contains no nucleotide
  misc_feature (426)..(426): n includes a, c, g, or t, or contains no nucleotide
  misc_feature (429)..(429): n includes a, c, g, or t, or contains no nucleotide
  misc_feature (435)..(435): n includes a, c, g, or t, or contains no nucleotide
  misc_feature (441)..(441): n includes a, c, g, or t, or contains no nucleotide
ccaggagctgctcatgtgcgtgagagtgggaaccatctccttgcggcagtggnttccgcgtgccccgtgtgctggtgcggttcccatcacgcagacaggaagggtgtttgcgcactctgatcaactggaacctctgtatcatgcggctgaattccctttttcctttactcaataaaagctacatcagactganaaaaannnnnnanantnttagtctcacctcggccacatggagccnattatccccnttggcagaaagatttttctttaaaaaaaaagnctagaataacncnagaaaccacatttaggantatgcttcnctcannggangnaggcagggaggacacnnnnnnnnnnnnnnnnnnnnnnnnnnnnnnnnnnnnnnnnnnnnnnnnnaatgggnnnanggncgnttcnctgtaacgngcnttttcnttcggnctttttttttttttttttttgctcccggccaaccggggcggaccattcttaaggcctttttgtatgcca

SEQ ID NO: 5285 - DNA, 224 bp, Homo sapiens
  misc_feature (94)..(108): n includes a, c, g, or t, or contains no nucleotide
ttccagctaacaggtctagaaaaccagcttgtggctaacagtccctgtggccgtccctgtgaagatgacattagcattgcccccaacctcattnnnnnnnnnnnnnnntagcctggctttcctgtctagtctctcctgtaagccaaagaaatgtacattccaagcagttggaagtgaaatctatgatgtgaaacactttgcctcctgtgtactgtgtcataaac

SEQ ID NO: 5286 - DNA, 505 bp, Homo sapiens
gcctgccatggccatctttgaactcctggactatattgtgaacgagccacctcctaagctgcccaacggtgtgttcacccccgacttccaggagtttgtcaataaatgcctcatcaagaacccagcggagcgggcggacctgaagatgctcacaaaccacaccttcatcaagcggtccgaggtggaagaagtggattttgccggctggttgtgtaaaaccctgcggctgaaccagcccggcacacccacgcgcaccgccgtgtgacagtggccgggctccctgcgtcccgctggtgacctgcccaccgtccctgtccatgccccgcccttccagctgaggacacgtggcgcctccacccaccctcctgcctcaccctgcggagagcaccgtggcggggcgacagcgcatgcaggaacgggggtctcctctcctgccagtcctggccggggtgcctctggggacgggcgacgctgctgtgtgtggtctcagaggctctgcttcctt

SEQ ID NO: 5287 - DNA, 590 bp, Homo sapiens
  misc_feature (88)..(88): n includes a, c, g, or t, or contains no nucleotide
  misc_feature (96)..(129): n includes a, c, g, or t, or contains no nucleotide
  misc_feature (211)..(227): n includes a, c, g, or t, or contains no nucleotide
  misc_feature (253)..(328): n includes a, c, g, or t, or contains no nucleotide
cttttcctccagtgctgcagggaggtggcagcccgctaccctcagatcaccttcgagaacatgattgtggataacaccaccatgcagntggtgtcnnnnnnnnnnnnnnnnnnnnnnnnnnnnnnnnnnaatctctatggcaacatcgtcaacaatgtctgcgcgggactggtcgggggcccaggccttgtggctggggccaactatggcnnnnnnnnnnnnnnnnntttgaaacagctacgaggaacaccgnnnnnnnnnnnnnnnnnnnnnnnnnnnnnnnnnnnnnnnnnnnnnnnnnnnnnnnnnnnnnnnnnnnnnnnnnnnncacctcaagctgcactcctatgccacctccatccgtaaggctgtcctggcatccatggacaatgagaatatgcacactccggacatcgggggccagggcacaacatctgaagccatccaggacgtcatccgccacatccgcgtcatcaacggccgggccgtggaggcctaggctggccctaggaccttcttggtttgctccttggattccccttcccactccagcaccccagccagcctggtacgcagatcccagaataaag

SEQ ID NO: 5288 - DNA, 451 bp, Homo sapiens
ttaactggcgaacagtgctgagtggcggcagcctctacatcgagatcccgggcggcgcgctgcccgaggggagcaaggacagctttgcagttctcctggagttcgctgaggagcagctgcgagccgaccatgtcttcatttgcttccacaagaaccgcgaggacagagccgccttgctccgaaccttcagctttttgggctttgagattgtgagaccggggcatccccttgtccccaagagacccgacgcttgcttcatggcctacacgttcgagagagagtcttcgggagaggaggaggagtagggccgcctcggggctgggcatccggcccctggggccaccccttgtcagccgggtgggtaggaaccgtagactcgctcatctcgcctgggtttgtccgcatgttgtaatcgtgcaaataaacgctcactccgaattagcggtgtatt

SEQ ID NO: 5289 - DNA, 212 bp, Homo sapiens
  misc_feature (129)..(150): n includes a, c, g, or t, or contains no nucleotide
gaaccagactagaaactgctggcagaactacctggacttccaccgctgtcagaaggcaatgaccgctaaaggaggcgatatctctgtgtgcgaatggtaccagcgtgtgtaccagtccctctgccccannnnnnnnnnnnnnnnnnnnnntgagcaacgggctgaaggcacgtttcccgggaagatctgaactggctgcatctccctttcct

SEQ ID NO: 5290 - DNA, 406 bp, Homo sapiens
  misc_feature (59)..(59): n includes a, c, g, or t, or contains no nucleotide
gcctcatcacaggtcaacgtggaggggcagtctcggctcaacgagaagatcctggaagnaaccgcaccctctgatgttccagaaactccaggaccagatctttaatctcatgaagtacgacagctacagccgcttcttaaagtctgacttgtttttaaaacacaagcgaaccgaggaagaggaagaagatttgcctgatgctcaaactgcagctaaaagagcttccagaatttataacacatgagcccccaaaaagccgggactggcagctttaagaagcaaaggaatttcctctcaggaccgtgccgggtttatcattgctttgttatttgtaaggactgaaatgtacaaaacccttcaatgggatgtgtgttttattaactgcttcaccagtaaattttgcatg

SEQ ID NO: 5291 - DNA, 559 bp, Homo sapiens
  misc_feature (29)..(46): n includes a, c, g, or t, or contains no nucleotide
  misc_feature (283)..(308): n includes a, c, g, or t, or contains no nucleotide
gcttcccaggccagctcaatgctgacctnnnnnnnnnnnnnnnnnncatggtcccgtttccccggctgcacttcttcatgcccggctttgccccactgaccagccggggcagccagcagtaccgggcgctgaccgtgcccgagctcacccagcagatgtttgatgccaagaacatgatggctgcctgcgacccccgccatggccgctacctgacggttgccgccgtgttcaggggccggatgtccatgaaggaggtggatgagcaaatgcttaatgtccaaannnnnnnnnnnnnnnnnnnnnnnnnntggatccccaacaatgtgaaaacggctgtctgtgacatcccacctcgggggctaaaaatgtccgccaccttcattggcaacagcacggccatccaggagctgttcaagcgcatctccgagcagttcacggccatgttccggcgcaaggccttcctgcactggtacacgggcgagggcatggacgagatggagttcaccgaggccgagagcaacatgaatgacctggtgtccgagtaccagcagtaccagga

SEQ ID NO: 5292 - DNA, 289 bp, Homo sapiens
  misc_feature (98)..(98): n includes a, c, g, or t, or contains no nucleotide
  misc_feature (113)..(113): n includes a, c, g, or t, or contains no nucleotide
  misc_feature (125)..(125): n includes a, c, g, or t, or contains no nucleotide
  misc_feature (129)..(129): n includes a, c, g, or t, or contains no nucleotide
atagctcgtcatctcggcccttgtccacactctccaagcacattacaggggacctgattgctacacgttcagaatgcgtttgctgtcatcctgcttgncctggccaggcctgncacagccttggncttncacgcctgagcgtggagagcacgagttagttgtagtccggcttgcggtggggctgacttcctgttggtttgagcccctttttgttttgccctctgggtgttttctttggtcccgcaggagggtgggtggagcaggtggactggagtttctcttgagggca

SEQ ID NO: 5293 - DNA, 317 bp, Homo sapiens
  misc_feature (78)..(175): n includes a, c, g, or t, or contains no nucleotide
cccctcatagttaagtagccactggtgtcctgggaatttctggttggatttggtgccctgaacttttttattaagaannnnnnnnnnnnnnnnnnnnnnnnnnnnnnnnnnnnnnnnnnnnnnnnnnnnnnnnnnnnnnnnnnnnnnnnnnnnnnnnnnnnnnnnnnnnnnnnnntattttagaaagagaggaaggatgtctgcagaactttgttctgttttctgccacaaaaatgtgaatagttcagagtgaaaaccttttgtgatggttgatgtctcaggaataagctggatctccaatgttttggggatgcttt

SEQ ID NO: 5294 - DNA, 480 bp, Homo sapiens
  misc_feature (77)..(99): n includes a, c, g, or t, or contains no nucleotide
  misc_feature (101)..(101): n includes a, c, g, or t, or contains no nucleotide
  misc_feature (225)..(240): n includes a, c, g, or t, or contains no nucleotide
aacccttgtatatggggacagtggggtcagtgcagctaccctttctttccctcctgcggaacagcggacccagcaannnnnnnnnnnnnnnnnnnnnnntncggagtggtctttggtttgggcggtggggcagaccttgggaaggggcttaggaagggagaggcagctcttccttcagctggctctcatcaggctgcagccccctccccgctcccacctccctgnnnnnnnnnnnnnnnnttatcacagcattattgtgacagccacgaacccattgcccacaacccctccaccctcggtcaccccaacctctggctctgagccctgttctgaccaaatcatgatgatgagtatttgggggtgggtgggtaagggggggagtgggaggggacggaaccaactttttctgtattttgtattgtatgttttcttcaacatgtaaccaatcagtatcttgtcaatatagtcagccgatcgatc

SEQ ID NO: 5295 - DNA, 500 bp, Homo sapiens
  misc_feature (28)..(31): n includes a, c, g, or t, or contains no nucleotide
  misc_feature (35)..(35): n includes a, c, g, or t, or contains no nucleotide
  misc_feature (52)..(52): n includes a, c, g, or t, or contains no nucleotide
  misc_feature (60)..(61): n includes a, c, g, or t, or contains no nucleotide
  misc_feature (103)..(103): n includes a, c, g, or t, or contains no nucleotide
  misc_feature (122)..(122): n includes a, c, g, or t, or contains no nucleotide
  misc_feature (131)..(131): n includes a, c, g, or t, or contains no nucleotide
  misc_feature (237)..(297): n includes a, c, g, or t, or contains no nucleotide
  misc_feature (416)..(425): n includes a, c, g, or t, or contains no nucleotide
  misc_feature (449)..(455): n includes a, c, g, or t, or contains no nucleotide
  misc_feature (458)..(474): n includes a, c, g, or t, or contains no nucleotide
agggtcatcctgagggtgcgactccgcnnnnatgntgacccggttcctgggncccacgcnntaccgggagctggtcaagaactgggtcccgacggcctacacnatggggcgctgtgggcgcncgtggggcntggtgtgggccaccgattggcggctgatcctggactgggtaccttacatcaatggcaagtttaagaaggataattaattacacaaacccttcacagactgctctgnnnnnnnnnnnnnnnnnnnnnnnnnnnnnnnnnnnnnnnnnnnnnnnnnnnnnnnnnnnnngcagcccaagcctcaggatggacaagaggaaacccacagctcagcttcaggcttcttatgtttctgaaaacagcttggatattttaatgcacgttgcattaaacctcactgaaacctgnnnnnnnnnnaaaaaaaaaaaaaaaaaaaaaaannnnnnnatnnnnnnnnnnnnnnnnngctttggttacttgtgacttgtaagc

SEQ ID NO: 5296 - DNA, 479 bp, Homo sapiens
  misc_feature (166)..(193): n includes a, c, g, or t, or contains no nucleotide
  misc_feature (271)..(293): n includes a, c, g, or t, or contains no nucleotide
cctagccagctgtcaagggcagaatgaatctatgctggataagaaatggtggaactgcgttatgaagagctaatttactggacaaagaattccaaagcaaaaccagaacagtatgaatttgagcaggtctcataggttgagcaatttccccctaaaccaactgaannnnnnnnnnnnnnnnnnnnnnnnnnnnaccaatgcaagacgccctctatcatggtgaaaagctccatcaatgaggtatcttctttagtggtggtatgtaatggannnnnnnnnnnnnnnnnnnnnnntgaaatgcattgctctggatctgttccttggcagtggactcagaaagccaacatgtggctcctcccagcccataaccagtatttttgctgcttctgaatacaaattggttggttttgacttcagattgaacttactgtagcctcagatgatttcccccctccgcctccaggaagaaagaatgttac

SEQ ID NO: 5297 - DNA, 504 bp, Homo sapiens
  misc_feature (51)..(66): n includes a, c, g, or t, or contains no nucleotide
  misc_feature (139)..(139): n includes a, c, g, or t, or contains no nucleotide
  misc_feature (196)..(196): n includes a, c, g, or t, or contains no nucleotide
  misc_feature (299)..(301): n includes a, c, g, or t, or contains no nucleotide
  misc_feature (387)..(387): n includes a, c, g, or t, or contains no nucleotide
  misc_feature (422)..(422): n includes a, c, g, or t, or contains no nucleotide
  misc_feature (424)..(427): n includes a, c, g, or t, or contains no nucleotide
  misc_feature (461)..(461): n includes a, c, g, or t, or contains no nucleotide
agtgctgctggtatttgccaacaagcaggacatgcccaacgccatgcccgnnnnnnnnnnnnnnnncaagctggggctacagcacttacgcagccgcacgtggtatgtccaggccacctgtgccacccaaggcacaggntctgtacgatggtctggactggctgtcccacgagctgtcaaagcgctaaccagccangggcaggcccctgatgcccggaagctcctgcgtgcatccccgggatgaccagactcccggactcctcaggcagtgccctttcctcccacttttcctcccccannnccacaggcctctgctcctgctcctgcctgcatgttctctctgttgttggagcctggagccttgctctctgggcacagaggggtccnctctcctgcctgctgggacctatggaaggggcttncnnnncaaggccccctcttccagaggaggagcagggatntgggtttccttttttttttctgttttgggtgtactctaggggc

SEQ ID NO: 5298 - DNA, 250 bp, Homo sapiens
  misc_feature (142)..(164): n includes a, c, g, or t, or contains no nucleotide
  misc_feature (220)..(220): n includes a, c, g, or t, or contains no nucleotide
gaaacttctggaggtcaaactgggggagctgccaagctggatcttgatgcgggacttcagtcctagtggcattttcggagcgtttcaaagaggttactaccggtactacaacaagtacatcaatgtgaagaaggggagcatnnnnnnnnnnnnnnnnnnnnnnncatgctacgtgctctttagctactccttttcctacaagcatctcaagcacgagcgnctccgcaaataccactgaagaggacacact

SEQ ID NO: 5299 - DNA, 445 bp, Homo sapiens
cttggccatctagcattccatacaaaattgtttcctataagcattccttttattctctattctatcctgggtctgcctcaaccgtgagataggagagtctctggtactagctgctgtagcagtgcccttcatccagggcagttaatggagtcttggaccctttctttctctgggatccctgcccagcaccttcctatagagatgactttaaaaggaaaaaaaaaaaaaaacccacatgatttcaaggagtctggcattcctgaatccttcttccctgccaggtgcctgtcacctgtcttcactgcctccttttccctgtcatgctcatcagcttatggcttctgtctaagcacctgaacagaggactgaaacctccactgcaggctggttttaggtcttgaattatgtaagaatcttgcacagcactgctaatgtaaatttcagt

SEQ ID NO: 5300 - DNA, 518 bp, Homo sapiens
  misc_feature (133)..(133): n includes a, c, g, or t, or contains no nucleotide
  misc_feature (146)..(146): n includes a, c, g, or t, or contains no nucleotide
tcatctccctggagggcaagcctttgtgagccccttctggccccctgcctggagcatctggcagccccacacctgcccttgggggttgcaggctgcccccttcctgccagaccggaggggctggggggatccnagcagggggaggncaatcccttcaccccagttgccaaacagaccccccaccccctggattttccttctccctccatcccttgacggttctggccttcccaaactgcttttgatcttttgattcctcttgggctgaagcagaccaagttccccccaggcaccccagttgtgggggagcctgtattttttttaacaacatccccattccccacctggtcctcccccttcccatgctgccaacttctaaccgcaatagtgactctgtgcttgtctgtttagttctgtgtataaatggaatgttgtggagatgacccctccctgtgccggctggttcctctcccttttcccctggtcacggctactcatggaagcaggaccagtaaggg

SEQ ID NO: 5301 - DNA, 504 bp, Homo sapiens
  misc_feature (56)..(72): n includes a, c, g, or t, or contains no nucleotide
  misc_feature (227)..(241): n includes a, c, g, or t, or contains no nucleotide
  misc_feature (308)..(323): n includes a, c, g, or t, or contains no nucleotide
  misc_feature (359)..(359): n includes a, c, g, or t, or contains no nucleotide
acacgcttgggtagcgggataagtcactgttttctttatttctttaaaaaaaaaannnnnnnnnnnnnnnnngactgctgttggattctgagggtggggagggagagagagggagggagagggagtgaagagcctgccctcctatatggattcttcagggccctccacatctgaggtggctcattcccatcacacacagattgtcctggtgttcatttcaaggccannnnnnnnnnnnnnngtttggaaagcaggttctgtgggaccccccgccccgccccccgcactccttcatagcagcagtagtnnnnnnnnnnnnnnnntttctgcaacattctatacaaaactgtgctgtgacnttgcggtaggcctggatctggcaaagagaatacaaatgaaaccccttctttctctttccgtccaacaactctgtagagctctctgcacccttacccctttccaccttttgtatttaattttaaagtcagtgtactgcaaggaagc

SEQ ID NO: 5302 - DNA, 303 bp, Homo sapiens
  misc_feature (169)..(169): n includes a, c, g, or t, or contains no nucleotide
ttcttgtggctacatcatccctggctgtggatagtgcttttgtgtagcaaatgctccctccttaaggttatagggctccctgagtttgggagtgtggaagtactacttaactgtctgtcctgcttggctgtcgttatcgttttctggtgatgttgtgctaacaataagnagtacacgggtttatttctgtggcctgagaaggaagggacctccacgacaggtgggctgggtgcgatcgccggctgtttggcatgttcccaccgggagtgccgggcaggagcatggggtgcttggttgtttcct

SEQ ID NO: 5303 - DNA, 508 bp, Homo sapiens
tcgccaggcaggagtttctctcggtgactactatcgctgtcatgtctggtcgtggcaagcaaggaggcaaggcccgcgccaaggccaagtcgcgctcgtcccgcgctggccttcagttcccggtagggcgagtgcatcgcttgctgcgcaaaggcaactacgcggagcgagtgggggccggcgcgcccgtctacatggctgcggtcctcgagtatctgaccgccgagatcctggagctggcgggcaacgcggctcgggacaacaagaagacgcgcatcatccctcgtcacctccagctggccatccgcaacgacgaggaactgaacaagctgctgggcaaagtcaccatcgcccagggcggcgtcttgcctaacatccaggccgtactgctccctaagaagacggagagtcaccacaaggcaaagggcaagtgaggctgacgtccggcccaagtgggcccagcccggcccgcgtctcgaaggggcacctgtgaactcaaaaggctctt

SEQ ID NO: 5304 - DNA, 341 bp, Homo sapiens
  misc_feature (62)..(62): n includes a, c, g, or t, or contains no nucleotide
  misc_feature (68)..(69): n includes a, c, g, or t, or contains no nucleotide
  misc_feature (82)..(83): n includes a, c, g, or t, or contains no nucleotide
  misc_feature (104)..(104): n includes a, c, g, or t, or contains no nucleotide
  misc_feature (295)..(295): n includes a, c, g, or t, or contains no nucleotide
ggttatcaacgaaacttctcagcatcacgatgaccttgaataaaaattgcacacactcagtngcagcnnatatattaccagnncaagaataaaaaagaaatccnatatcttaaagaaacagctttcaagtgcctttctgcagtttttcaggagcgcaagatagatttggaataggaataagctctagttcttaacaaccgacactcctacaagatttagaaaaaagtttacaacataatctagtttacagaaaaatcttgtgctagaatactttttaaaaggtattttgaatacnattaaaactgcttttttttttccagcaagtatccaaccaacttggt

SEQ ID NO: 5305 - DNA, 378 bp, Homo sapiens
gtatctgatatcagcactggattgtagaacttgttgctgattttgaccttgtattgaagttaactgttccccttggtatttgtttaataccctgtacatatctttgagttcaacctttagtacgtgtggcttggtcacttcgtggctaaggtaagaacgtgcttgtggaagacaagtctgtggcttggtgagtctgtgtggccagcagcctctgatctgtgcagggtattaacgtgtcagggctgagtgttctgggatttctctagaggctggcaagaaccagttgttttgtcttgcgggtctgtcagggttggaaagtccaagccgtaggacccagtttcctttcttagctgatgtctttggccagaacaccgtggg

SEQ ID NO: 5306 - DNA, 226 bp, Homo sapiens
ctgattatacttgagtggaatcctttcctcacgtactcccacagacgtctgggcctggaaattttttttttattttattttattgtttttttttttagaaaaacaccacttttattatgtacaataaaatatttcattagcttgaattgtatagatttttaaaaattcaatgaaagcatgttgtttaatttctttttaaaatcactgttgggctttgaaagcattg

SEQ ID NO: 5307 - DNA, 445 bp, Homo sapiens
tacatcaacgtggaacgagaggagtggaagctggacacactatgtgacttgtatgaaaccctgaccatcacccaggcagtcatcttcatcaacacccggaggaaggtggactggctcaccgagaagatgcatgctcgagatttcactgtatccgccatgcatggagatatggaccaaaaggaacgagacgtgattatgagggagtttcgttctggctctagcagagttttgattaccactgacctgctggccagaggcattgatgtgcagcaggtttctttagtcatcaactatgaccttcccaccaacagggaaaactatatccacagaatcggtcgaggtggacggtttggccgtaaaggtgtggctattaacatggtgacagaagaagacaagaggactcttcgagacattgagaccttctacaacacctccattgaggaaa

SEQ ID NO: 5308 - DNA, 413 bp, Homo sapiens
  misc_feature (45)..(45): n includes a, c, g, or t, or contains no nucleotide
tctccacatttccatagagaccgtgtggtttttgttcacccgggnccccccgtcttcctccctgtccccccatttataggcataaaatccactgtctgccagcctcccttccctcccacctttttggtacattggtgtaaaaaatgtaaaacaaaaaaattttatgaactaactgtggtgtgtgaaagagagaagaaaaactggaaatcttattccgtgtgtgtttgggagttgcttggggttgggggtcgtggggacaggggacagctctgggagcagaggtggccctcggtgccgtcctgcgcagactctcccgtcccacggaggccgcggggtgggggctggggggggtgccgccgaccgttccgctcttccggccaggtgcttttctgtcaatttctatggaatgcaaa

SEQ ID NO: 5309 - DNA, 342 bp, Homo sapiens
  misc_feature (140)..(140): n includes a, c, g, or t, or contains no nucleotide
ccgcaaatgcttctaggcggactatgacttagttgcgttacaccctttcttgacaaaacctaacttgcgcagaaaacaagatgagattggcatggctttatttgttttttttgttttgttttggtttttttttttttttnggcttgactcaggatttaaaaactggaacggtgaaggtgacagcagtcggttggagcgagcatcccccaaagttcacaatgtggccgaggactttgattgcacattgttgtttttttaatagtcattccaaatatgagatgcattgttacaggaagtcccttgccatcctaaaagccaccccacttctctctaaggagaatg

SEQ ID NO: 5310 - DNA, 144 bp, Homo sapiens
catggtgctgaatggctgaggaccttcccagtctccccagagtccgtgcctttccctgtgtgaattttgtatctagcctaaagtttccctaggctttcttgtctcagcaactttcccatcttgtctctcttggatgatgtttgc

SEQ ID NO: 5311 - DNA, 140 bp, Homo sapiens
tcatcgccgcatcaagagaagatctggccttatgcccaggcctgggccctcagaaagcccggaggctgtttgatgtcctgcacgagcccttcttgaaagtaccctgatgaccccagctgccaaggaaacccccagtgtaa

SEQ ID NO: 5312 - DNA, 480 bp, Homo sapiens
  misc_feature (26)..(26): n includes a, c, g, or t, or contains no nucleotide
  misc_feature (59)..(59): n includes a, c, g, or t, or contains no nucleotide
  misc_feature (64)..(64): n includes a, c, g, or t, or contains no nucleotide
  misc_feature (85)..(85): n includes a, c, g, or t, or contains no nucleotide
  misc_feature (108)..(108): n includes a, c, g, or t, or contains no nucleotide
tgccctgtccaatgtgaggactgccntgggcagggtctgcccctcccacccctctctgnccctngggagccctacactccacttnggagtctggatggacacatgggnccaggggctctgaagcagcctcactcttaacttcgtgttcacactccatggaaaccccagactgggacacaggcggaagcctaggagagccgaatcagtgtttgtgaagaggcaggactggccagagtgacagacatacggtgatccaggaggctcaaagagaagccaagtcagctttgttgtgatttgattttttttaaaaaactcttgtacaaaactgatctaattcttcactcctgctccaagggctgggctgtgggtgggatactgggattttgggccactggattttccctaaatttgtcccccctttactctccctctatttttctctccttagactccctcagacctgtaaccagctttgtgtct

SEQ ID NO: 5313 - DNA, 392 bp, Homo sapiens
  misc_feature (38)..(38): n includes a, c, g, or t, or contains no nucleotide
  misc_feature (52)..(52): n includes a, c, g, or t, or contains no nucleotide
  misc_feature (121)..(121): n includes a, c, g, or t, or contains no nucleotide
  misc_feature (366)..(366): n includes a, c, g, or t, or contains no nucleotide
gaagaagacttctttctctacattgcctacagtgacgnaaagtgtctacggntctgtgaagctgctgcccctgagctggaggggggtctcattctacaaagagagaggtggcccccctttncttgacctcctcctccttcaagctcaaacaccacctcccttattcaggaccggcacttcttaatgtttgtggctttctctccagcctctcttaggaggggtaatggtggagttggcatcttgtaactctcctttctcctttcttcccctttctctgcccgcctttcccatcctgctgtagacttcttgattgtcagtctgtgtcacatccagtgattgttttggtttctgttccctttctgactncccaaggggctcagaaccccagcaat

SEQ ID NO: 5314 - DNA, 470 bp, Homo sapiens
  misc_feature (41)..(55): n includes a, c, g, or t, or contains no nucleotide
gggcacgcccattccagctggagtcgtggggctgggcacannnnnnnnnnnnnnnagctgagcctgacgtctgctctgaagaatgcttagaaggttcccagacaccagagccagatgtcccccaccaccggtcaggacctccttgaggtgcacaagcacggtctcctctgagttcaccccagcccacccccgcacccactaattctgcttttcctgccccttgctccgtaaaagtatcaaatactttctccttggtatctcaaggaggtttctgagataggtagaagtcttgagacggaggctggccatccattcagccctgagcgtgctgagttctgtgtttctctgaatagaggtgtggaacctgaggggccagcaggcctctctgaaggcctccatggagcaaacggagccacctcgggaaagagtttaatggaatatttttgtacccgatgtttacagatgctgtt

SEQ ID NO: 5315 - DNA, 462 bp, Homo sapiens
  misc_feature (47)..(47): n includes a, c, g, or t, or contains no nucleotide
  misc_feature (87)..(87): n includes a, c, g, or t, or contains no nucleotide
  misc_feature (99)..(99): n includes a, c, g, or t, or contains no nucleotide
  misc_feature (105)..(105): n includes a, c, g, or t, or contains no nucleotide
  misc_feature (112)..(112): n includes a, c, g, or t, or contains no nucleotide
  misc_feature (116)..(116): n includes a, c, g, or t, or contains no nucleotide
  misc_feature (127)..(128): n includes a, c, g, or t, or contains no nucleotide
  misc_feature (148)..(148): n includes a, c, g, or t, or contains no nucleotide
  misc_feature (153)..(153): n includes a, c, g, or t, or contains no nucleotide
  misc_feature (176)..(176): n includes a, c, g, or t, or contains no nucleotide
  misc_feature (181)..(181): n includes a, c, g, or t, or contains no nucleotide
  misc_feature (188)..(188): n includes a, c, g, or t, or contains no nucleotide
  misc_feature (194)..(194): n includes a, c, g, or t, or contains no nucleotide
  misc_feature (198)..(198): n includes a, c, g, or t, or contains no nucleotide
  misc_feature (313)..(337): n includes a, c, g, or t, or contains no nucleotide
agctttcagtattagtgatgtcatctgtcactataggtcatacaatnccattcttaaagtacttgttatttgtttttattattactngtttgtcttctnccccangggttcnagtncctcaaggggnnccatcctgtcccaccatgcnagtgncccctagcttagagcctccctcnaattnccccctnggccanccanccccccactctgtgcctgaccttgaggagtcttgtgtgcattgctgtgaattagctcacttggtgatatgtcctatattggctaaattgaaacctggaattgtggggcaatctannnnnnnnnnnnnnnnnnnnnnnnncttacccttagggaggctgggggaaaaggttagattttgtattcaggggttttttgtgtactttttgggttttttaaaaattgtttttggaggggtttatgctcaatccatgttctatttcagtg
